(19) United States
(12) Patent Application Publication
(10) Pub. No.: US 2026/0193645 A1
(43) Pub. Date: Jul. 9, 2026

(54) COMPOSITIONS AND METHODS FOR BASE EDITING A PHENYLALANINE HYDROXYLASE POLYNUCLEOTIDE

(71) Applicant: Beam Therapeutics Inc., Cambridge, MA (US)

(72) Inventors: Tanggis Bohnuud, Cambridge, MA (US); Mandy Sze Lee, Cambridge, MA (US); Yi Yu, Cambridge, MA (US)

(73) Assignee: Beam Therapeutics Inc., Cambridge, MA (US)

(21) Appl. No.: 19/556,903

(22) Filed: Mar. 4, 2026

Related U.S. Application Data
(63) Continuation of application No. PCT/US2024/046693, filed on Sep. 13, 2024.
(60) Provisional application No. 63/582,942, filed on Sep. 15, 2023.

(51) Int. Cl. C12N 15/11; A61P 3/00; C12N 9/22; C12N 9/78; C12N 15/88; C12N 15/90

(52) U.S. Cl. CPC C12N 15/11; A61P 3/00; C12N 9/226; C12N 9/78; C12N 15/88; C12N 15/907; C12Y 305/04004; C12N 2310/20

(57) ABSTRACT

Compositions and methods for treating phenylketonuria by introducing one or more alterations into a phenylalanine hydroxylase (PAH) polynucleotide in a cell. In particular embodiments, the disclosure provides a base editor system (e.g., a fusion protein or complex comprising a programable DNA binding protein, a nucleobase editor, and gRNA) for modifying a PAH polynucleotide, where the alteration is associated with an increase in the level or activity of a PAH polypeptide encoded by the polynucleotide.

### CROSS REFERENCE TO RELATED APPLICATIONS

[0001] This application is a continuation under 35 U.S.C. § 111 (a) of PCT International Patent Application No. PCT/US2024/046693, filed Sep. 13, 2024, designating the United States and published in English, which claims priority to and the benefit of U.S. Provisional Application No. 63/582,942, filed Sep. 15, 2023, the entire contents of each of which are incorporated by reference herein.

### SEQUENCE LISTING

[0002] This application contains a Sequence Listing which has been submitted electronically in XML format and is hereby incorporated by reference in its entirety. The Sequence Listing XML file, created on Sep. 11, 2024, is named 180802-055902PCT_SL.xml and is 1,311,624 bytes in size.

### BACKGROUND

[0003] Phenylalanine hydroxylase (PAH) deficiency prevents the conversion of phenylalanine (Phe) to tyrosine. Untreated phenylketonuria (PKU) patients can have very high blood Phe levels of more than 1200 μmol/L (normal Phe levels are less than 120 μmol/L), with neurocognitive and neuropsychiatric sequelae. A strict low-Phe diet is the mainstay of treatment, with the goal of maintaining Phe levels of 120-360 μmol/L, which still exceed the physiologic range. However, many PKU patients find it challenging to adhere to the unpalatable and cost-prohibitive diet.

[0004] There are only two approved medical therapies for treating PKU. The first is sapropterin, an oral medication that serves as a cofactor of the PAH protein and can improve the activity of some mutant forms of PAH. However, the P281L variant, one of the most common PKU pathogenic variants with its highest prevalence in populations in the Middle East, Europe, and Russia (e.g., present in 14.8% of PKU patients in the Netherlands, 11.2% in Turkey, 10.8% in Portugal, 10.3% in Italy, and 9.4% in Germany), is unresponsive to sapropterin (i.e., blood Phe levels do not improve with sapropterin treatment). The second is pegvaliase, an injectable enzyme that acts directly to catabolize Phe. However, pegvaliase carries a substantial risk of anaphylaxis and has a black box warning from the U.S. Food and Drug Administration on its label for that reason. In addition, the dosing regimen is complex, starting with once-weekly injections and slowly up-titrating to once-daily injections, and it is available in the U.S. only through a Risk Evaluation and Mitigation Strategy program. In a long-term study, patients on pegvaliase achieved a mean 51% Phe reduction at 1 year after initiation (1233-565 μmol/L). Thus, a safe one-time therapy that would durably, even permanently, normalize blood Phe levels would be a vastly superior treatment option over existing alternatives.

[0005] Therefore, there is a present need for improved compositions and methods for treatment of PKU.

### SUMMARY

[0006] As described below, the disclosure features compositions and methods for treating phenylketonuria by introducing one or more alterations into a phenylalanine hydroxylase (PAH) polynucleotide in a cell. In particular embodiments, the disclosure provides a base editor system (e.g., a fusion protein or complex containing a programable DNA binding protein, a nucleobase editor, and gRNA) for modifying a PAH polynucleotide, where the alteration is associated with an increase in activity of a PAH polypeptide encoded by the polynucleotide.

[0007] In one aspect, the disclosure features a method of editing a nucleobase of an phenylalanine hydroxylase (PAH) polynucleotide. The method involves contacting the PAH polynucleotide with a guide RNA, or a polynucleotide encoding the guide RNA, and a base editor containing a fusion protein or a protein complex containing a nucleic acid programmable DNA binding protein (napDNAbp) domain and a deaminase domain, or one or more polynucleotides encoding the base editor. The guide RNA targets the base editor to effect an alteration to a nucleobase in codon 408 of the PAH polynucleotide.

[0008] In one aspect, the disclosure features a method of editing a nucleobase of an phenylalanine hydroxylase (PAH) polynucleotide. The method involves contacting the PAH polynucleotide with a guide RNA, or a polynucleotide encoding the guide RNA, and a base editor containing a fusion protein or a protein complex containing a nucleic acid programmable DNA binding protein (napDNAbp) domain and a deaminase domain, or one or more polynucleotides encoding the base editor. The guide RNA targets the base editor to effect an alteration to a nucleobase in codon 408 of the PAH polynucleotide. The deaminase domain contains the following amino acid sequence with one or more amino acid alterations MSEVEFSHEYWMRHALTLAKRARDEREVPVGAVLVLNNRVIGEGWNRAIGLHDPTAHAEIMALR QGGLVMQNYRLIDATLYVTFEPCVMCAGAMIHSRIGRVVFGVRNAKTGAAGSLMDVLHYPGMNH RVEITEGILADECAALLCYFFRMPRQVFNAQKKAQSSTD (SEQ ID NO: 1), or a fragment thereof lacking only the N-terminal methionine. The one or more amino acid alterations contains a set of alterations selected from one or more of: a) I76Y, V82T, Y123H, Y147R, and Q154R; b) I76Y, V82T, Y123H, Y147R, F149Y, and Q154R; and c) I76Y, V82T, Y123H, Y147D, F149Y, Q154R, T166I, and D167N.

[0009] In another aspect, the disclosure features a method of treating phenylketonuria (PKU) in a subject in need thereof. The method involves administering to a cell of the subject a base editor system containing a base editor containing fusion protein or protein complex containing a nucleic acid programmable DNA binding protein (napDNAbp) domain and a deaminase domain, or one or more polynucleotides encoding the base editor, and a guide RNA that targets the base editor to effect an alteration to a nucleobase in codon 408 of a phenylalanine hydroxylase (PAH) polynucleotide in the cell, or a polynucleotide encoding the guide RNA, thereby treating hypertension in the subject.

[0010] In another aspect, the disclosure features a method of treating phenylketonuria (PKU) in a subject in need thereof. The method involves administering to a cell of the subject a base editor system containing a base editor containing fusion protein or protein complex containing a nucleic acid programmable DNA binding protein (napDNAbp) domain and a deaminase domain, or one or more polynucleotides encoding the base editor, and a guide RNA that targets the base editor to effect an alteration to a nucleobase in codon 408 of a phenylalanine hydroxylase (PAH) polynucleotide in the cell, or a polynucleotide encoding the guide RNA, thereby treating hypertension in the subject. The deaminase domain contains the following amino acid sequence with one or more amino acid alterations MSEVEFSHEYWMRHALTLAKRARDEREVPVGAVLVLNNRVIGEGWNRAIGLHDPTAHAEIMALR QGGLVMQNYRLIDATLYVTFEPCVMCAGAMIHSRIGRVVFGVRNAKTGAAGSLMDVLHYPGMNH RVEITEGILADECAALLCYFFRMPRQVFNAQKKAQSSTD (SEQ ID NO: 1), or a fragment thereof lacking only the N-terminal methionine. The one or more amino acid alterations contains a set of alterations selected from one or more of: a) I76Y, V82T, Y123H, Y147R, and Q154R; b) I76Y, V82T, Y123H, Y147R, F149Y, and Q154R; and c) I76Y, V82T, Y123H, Y147D, F149Y, Q154R, T166I, and D167N.

[0011] In another aspect, the disclosure features a modified cell containing an alteration in a nucleobase of an PAH polynucleotide. The alteration is prepared by the method of any one of the aspects of the disclosure, or embodiments thereof. The alteration increases activity of the encoded PAH polypeptide as compared to a control cell without the alteration.

[0012] In another aspect, the disclosure features a base editor system containing a base editor or one or more polynucleotides encoding the base editor. The base editor contains a nucleic acid programmable DNA binding protein domain (napDNAbp) and a deaminase domain, and a guide RNA that targets the base editor to effect an alteration to a nucleobase in codon 408 of the PAH polynucleotide.

[0013] In another aspect, the disclosure features a base editor system containing a base editor or one or more polynucleotides encoding the base editor. The base editor contains a nucleic acid programmable DNA binding protein domain (napDNAbp) and a deaminase domain, and a guide RNA that targets the base editor to effect an alteration to a nucleobase in codon 408 of the PAH polynucleotide. The deaminase domain contains the following amino acid sequence with one or more amino acid alterations MSEVEFSHEYWMRHALTLAKRARDEREVPVGAVLVLNNRVIGEGWNRAIGLHDPTAHAEIMALR QGGLVMQNYRLIDATLYVTFEPCVMCAGAMIHSRIGRVVFGVRNAKTGAAGSLMDVLHYPGMNH RVEITEGILADECAALLCYFFRMPRQVFNAQKKAQSSTD (SEQ ID NO: 1), or a fragment thereof lacking only the N-terminal methionine. The one or more amino acid alterations contains a set of alterations selected from one or more of: a) I76Y, V82T, Y123H, Y147R, and Q154R; b) I76Y, V82T, Y123H, Y147R, F149Y, and Q154R; and c) I76Y, V82T, Y123H, Y147D, F149Y, Q154R, T166I, and D167N.

[0014] In another aspect, the disclosure features a set of polynucleotides encoding the base editor system of any aspect of the disclosure, or embodiments thereof, or a component thereof.

[0015] In another aspect, the disclosure features a lipid nanoparticle containing the base editor system or set of polynucleotides of any aspect of the disclosure or embodiments thereof.

[0016] In another aspect, the disclosure features a pharmaceutical composition containing the base editor system, the set of polynucleotides, or the lipid nanoparticle of any aspect of the disclosure, or embodiments thereof, and a pharmaceutically acceptable excipient.

[0017] In another aspect, the disclosure features a kit containing the base editor system of any, the set of polynucleotides, the lipid nanoparticle, or the pharmaceutical composition, of any aspect of the disclosure, or embodiments thereof, for use in the method of any aspect of the disclosure, or embodiments thereof, where the kit further contains a container.

[0018] In another aspect, the disclosure features a guide RNA containing a sequence listed in Table 1.

[0019] In any aspect of the disclosure, or embodiments thereof, the alteration to the nucleobase in codon 408 of the PAH polynucleotide results in a W408R amino acid alteration in a PAH polypeptide encoded by the PAH polynucleotide.

[0020] In any aspect of the disclosure, or embodiments thereof, the guide RNA contains a spacer containing at least 10 contiguous nucleotides of a spacer sequence selected from those listed in Table 1. In any aspect of the disclosure, or embodiments thereof, the guide RNA contains a spacer containing a spacer sequence selected from those listed in Table 1. In any aspect of the disclosure, or embodiments thereof, the guide RNA containing a guide sequence selected from those listed in Table 1.

[0021] In any aspect of the disclosure, or embodiments thereof, the deaminase domain contains: a) a TadA*8.20 domain, b) a TadA*8.20 domain containing a V82T amino acid alteration, c) a TadA*8.20 domain containing the amino acid alterations V82T and F149Y, or d) a TadA*8.20 domain containing the amino acid alterations V82T, R147D, F149Y, T166I, and D167N.

[0022] In any aspect of the disclosure, or embodiments thereof, the napDNAbp domain is selected from the one or more of an SpCas9, an SaCas9, an iSpymac, and an NmeCas9. In any aspect of the disclosure, or embodiments thereof, the napDNAbp domain binds a protospacer adjacent motif (PAM) selected from the one or more of NRN, NAA, NCA, NGC, NRCH, NG, NRTH, NNNRRT, and NGG, where “N” is A, C, G, or T, “R” is A or G, and “H” is A, C, or T.

[0023] In any aspect of the disclosure, or embodiments thereof, the base editor contains an amino acid sequence having at least 85% sequence identity to a sequence selected from those listed in Table 2. In any aspect of the disclosure, or embodiments thereof, the base editor contains an amino acid sequence selected from those listed in Table 2. In any aspect of the disclosure, or embodiments thereof, the one or more polynucleotides encoding the base editor contain an RNA sequence encoding a polypeptide having at least 85% sequence identity to an amino acid sequence selected from those listed in Table 2. In any aspect of the disclosure, or embodiments thereof, the one or more polynucleotides encoding the base editor contain an RNA encoding a polypeptide having an amino acid sequence selected from those listed in Table 2.

[0024] In any aspect of the disclosure, or embodiments thereof, the deaminase is inserted within the napDNAbp domain. In any aspect of the disclosure, or embodiments thereof, the deaminase is an adenosine deaminase.

[0025] In any aspect of the disclosure, or embodiments thereof, the PAH polynucleotide is in a cell. In any aspect of the disclosure, or embodiments thereof, the cell is in vivo or in vitro. In any aspect of the disclosure, or embodiments thereof, the cell is a mammalian cell. In any aspect of the disclosure, or embodiments thereof, the cell is a liver cell. In any aspect of the disclosure, or embodiments thereof, the cell is a hepatocyte.

[0026] In any aspect of the disclosure, or embodiments thereof, alteration of the nucleobase is associated with an increase in phenylalanine hydroxylase activity in the subject or with a reduction in phenylalanine levels in a biological sample of the subject. In any aspect of the disclosure, or embodiments thereof, the phenylalanine levels in the biological sample are reduced by at least about 10, 25, 50, or 75% or where the levels are reduced to about 2-6 mg/dL or less.

[0027] In any aspect of the disclosure, or embodiments thereof, the base editor system is administered to the subject using a lipid nanoparticle containing the guide RNA and an mRNA molecule encoding the base editor.

### Definitions

[0028] Unless defined otherwise, all technical and scientific terms used herein have the meaning commonly understood by a person skilled in the art to which this disclosure belongs. The following references provide one of skill with a general definition of many of the terms used in this disclosure: Singleton et al., Dictionary of Microbiology and Molecular Biology (2nd ed. 1994); The Cambridge Dictionary of Science and Technology (Walker ed., 1988); The Glossary of Genetics, 5th Ed., R. Rieger et al. (eds.), Springer Verlag (1991); and Hale & Marham, The Harper Collins Dictionary of Biology (1991). As used herein, the following terms have the meanings ascribed to them below, unless specified otherwise.

[0029] By “phenylalanine hydroxylase (PAH) polypeptide” is meant a protein with at least about 85% amino acid sequence identity to GenBank Accession No. AAA60082.1, which is provided below, or a fragment thereof. A functional PAH polypeptide is capable of catalyzing the hydroxylation of phenylalanine to tyrosine.

>AAA60082.1 Phenylalanine Hydroxylase [Homo sapiens]

(SEQ ID NO: 647)
MSTAVLENPGLGRKLSDFGQETSYIEDNCNQNGAISLIFSLKEEV
GALAKVLRLFEENDVNLTHIESRPSRLKKDEYEFFTHLDKRSLPA
LTNIIKILRHDIGATVHELSRDKKKDTVPWFPRTIQELDRFANQI
LSYGAELDADHPGFKDPVYRARRKQFADIAYNYRHGQPIPRVEYM
EEEKKTWGTVFKTLKSLYKTHACYEYNHIFPLLEKYCGFHEDNIP
QLEDVSQFLQTCTGFRLRPVAGLLSSRDFLGGLAFRVFHCTQYIR
HGSKPMYTPEPDICHELLGHVPLFSDRSFAQFSQEIGLASLGAPD
EYIEKLATIYWFTVEFGLCKQGDSIKAYGAGLLSSFGELQYCLSE
KPKLLPLELEKTAIQNYTVTEFQPLYYVAESFNDAKEKVRNFAAT
IPRPFSVRYDPYTQRIEVLDNTQQLKILADSINSEIGILCSALQK
IK

[0030] By “phenylalanine hydroxylase (PAH) polynucleotide” is meant a nucleic acid molecule encoding a PAH polypeptide, as well as the introns, exons, 3′ untranslated regions, 5′ untranslated regions, and regulatory sequences associated with its expression, or fragments thereof. In embodiments, a PAH polynucleotide is the genomic sequence, cDNA, mRNA, or gene associated with and/or required for PAH expression. An exemplary PAH polynucleotide sequence is provided at ENSEMBL Gene Accession No. ENSG00000171759 (SEQ ID NO: 649). A further exemplary PAH nucleotide sequence from Homo Sapiens is provided below (GenBank Accession No.: K03020.1):

>K03020.1:223-1581 Human Phenylalanine Hydroxylase mRNA, Complete Cds

(SEQ ID NO: 648)
ATGTCCACTGCGGTCCTGGAAAACCCAGGCTTGGGCAGGAAACTC
TCTGACTTTGGACAGGAAACAAGCTATATTGAAGACAACTGCAAT
CAAAATGGTGCCATATCACTGATCTTCTCACTCAAAGAAGAAGTT
GGTGCATTGGCCAAAGTATTGCGCTTATTTGAGGAGAATGATGTA
AACCTGACCCACATTGAATCTAGACCTTCTCGTTTAAAGAAAGAT
GAGTATGAATTTTTCACCCATTTGGATAAACGTAGCCTGCCTGCT
CTGACAAACATCATCAAGATCTTGAGGCATGACATTGGTGCCACT
GTCCATGAGCTTTCACGAGATAAGAAGAAAGACACAGTGCCCTGG
TTCCCAAGAACCATTCAAGAGCTGGACAGATTTGCCAATCAGATT
CTCAGCTATGGAGCGGAACTGGATGCTGACCACCCTGGTTTTAAA
GATCCTGTGTACCGTGCAAGACGGAAGCAGTTTGCTGACATTGCC
TACAACTACCGCCATGGGCAGCCCATCCCTCGAGTGGAATACATG
GAGGAAGAAAAGAAAACATGGGGCACAGTGTTCAAGACTCTGAAG
TCCTTGTATAAAACCCATGCTTGCTATGAGTACAATCACATTTTT
CCACTTCTTGAAAAGTACTGTGGCTTCCATGAAGATAACATTCCC
CAGCTGGAAGACGTTTCTCAATTCCTGCAGACTTGCACTGGTTTC
CGCCTCCGACCTGTGGCTGGCCTGCTTTCCTCTCGGGATTTCTTG
GGTGGCCTGGCCTTCCGAGTCTTCCACTGCACACAGTACATCAGA
CATGGATCCAAGCCCATGTATACCCCCGAACCTGACATCTGCCAT
GAGCTGTTGGGACATGTGCCCTTGTTTTCAGATCGCAGCTTTGCC
CAGTTTTCCCAGGAAATTGGCCTTGCCTCTCTGGGTGCACCTGAT
GAATACATTGAAAAGCTCGCCACAATTTACTGGTTTACTGTGGAG
TTTGGGCTCTGCAAACAAGGAGACTCCATAAAGGCATATGGTGCT
GGGCTCCTGTCATCCTTTGGTGAATTACAGTACTGCTTATCAGAG
AAGCCAAAGCTTCTCCCCCTGGAGCTGGAGAAGACAGCCATCCAA
AATTACACTGTCACGGAGTTCCAGCCCCTGTATTACGTGGCAGAG
AGTTTTAATGATGCCAAGGAGAAAGTAAGGAACTTTGCTGCCACA
ATACCTCGGCCCTTCTCAGTTCGCTACGACCCATACACCCAAAGG
ATTGAGGTCTTGGACAATACCCAGCAGCTTAAGATTTTGGCTGAT
TCCATTAACAGTGAAATTGGAATCCTTTGCAGTGCCCTCCAGAAA
ATAAAGTAA

[0031] By “adenine” or “9H-Purin-6-amine” is meant a purine nucleobase with the molecular formula C₅H₅N₅, having the structure

[chemical structure]

and corresponding to CAS No. 73-24-5.

[0032] By “adenosine” or “4-Amino-1-[(2R,3R,4S,5R)-3,4-dihydroxy-5-(hydroxymethyl)oxolan-2-yl]pyrimidin-2(1H)-one” is meant an adenine molecule attached to a ribose sugar via a glycosidic bond, having the structure

[chemical structure]

and corresponding to CAS No. 65-46-3. Its molecular formula is C₁₀H₁₃N₅O₄.

[0033] By “adenosine deaminase” or “adenine deaminase” is meant a polypeptide or fragment thereof capable of catalyzing the hydrolytic deamination of adenine or adenosine. In some embodiments, the deaminase or deaminase domain is an adenosine deaminase catalyzing the hydrolytic deamination of adenosine to inosine or deoxy adenosine to deoxyinosine. In some embodiments, the adenosine deaminase catalyzes the hydrolytic deamination of adenine or adenosine in deoxyribonucleic acid (DNA). The adenosine deaminases (e.g., engineered adenosine deaminases, evolved adenosine deaminases) provided herein may be from any organism (e.g., eukaryotic, prokaryotic), including but not limited to algae, bacteria, fungi, plants, invertebrates (e.g., insects), and vertebrates (e.g., amphibians, mammals). In some embodiments, the adenosine deaminase is an adenosine deaminase variant with one or more alterations and is capable of deaminating both adenine and cytosine in a target polynucleotide (e.g., DNA, RNA) and may be referred to as a “dual deaminase”. Non-limiting examples of dual deaminases include those described in PCT/US22/22050. In some embodiments, the target polynucleotide is single or double stranded. In some embodiments, the adenosine deaminase variant is capable of deaminating both adenine and cytosine in DNA. In some embodiments, the adenosine deaminase variant is capable of deaminating both adenine and cytosine in single-stranded DNA. In some embodiments, the adenosine deaminase variant is capable of deaminating both adenine and cytosine in RNA. In embodiments, the adenosine deaminase variant is selected from those described in PCT/US2020/018192, PCT/US2020/049975, PCT/US2017/045381, PCT/US2021/016827, PCT/US2022/073781, PCT/US24/34189, or PCT/US2020/028568, the full contents of which are each incorporated herein by reference in their entireties for all purposes. Further non-limiting examples of adenosine deaminases include those disclosed or referenced in Rufflow, et al., “Design of highly functional genome editors by modeling of the universe of CRISPR-Cas Sequences,” bioRxiv, posted Apr. 22, 2024, doi: 10.1101/2024.04.22.590591, the disclosure of which is incorporated herein by reference in its entirety for all purposes, which were designed using artificial intelligence. Further exemplary adenosine deaminase amino acid sequences include: TadA-8e (SEQ ID NO: 470), Tad1 (SEQ ID NO: 471), Tad2 (SEQ ID NO: 472), Tad3 (SEQ ID NO: 473), Tad4 (SEQ ID NO: 474), Tad6 (SEQ ID NO: 475), Tad6-SR (SEQ ID NO: 476), TadA9 (SEQ ID NO: 477), TadA20 (SEQ ID NO: 478), Staphylococcus aureus TadA (SEQ ID NO: 479), Bacillus subtilis TadA (SEQ ID NO: 480), Salmonella typhimurium TadA (SEQ ID NO: 481), Shewanella putrefaciens (SEQ ID NO: 482), Haemophilus influenzae F3031 TadA (SEQ ID NO: 483), Caulobacter crescentus TadA (SEQ ID NO: 484), Geobacter sulfurreducens TadA (SEQ ID NO: 485), Streptococcus pyogenes TadA (SEQ ID NO: 486), Aquifex aeolicus TadA (SEQ ID NO: 487), and E. coli TadA deaminase (ecTadA) (SEQ ID NO: 488).

[0034] By “adenosine deaminase activity” is meant catalyzing the deamination of adenine or adenosine to guanine in a polynucleotide.

[0035] By “Adenosine Base Editor (ABE)” is meant a base editor comprising an adenosine deaminase.

[0036] By “Adenosine Base Editor (ABE) polynucleotide” is meant a polynucleotide encoding an ABE.

[0037] By “Adenosine Base Editor 8 (ABE8) polypeptide” or “ABE8” is meant a base editor as defined herein comprising an adenosine deaminase or adenosine deaminase variant comprising one or more of the alterations listed in Table 5B, one of the combinations of alterations listed in Table 5B, or an alteration at one or more of the amino acid positions listed in Table 5B, where such alterations are relative to the following reference sequence: MSEVEFSHEYWMRHALTLAKRARDEREVPVGAVLVLNNRVIGEGWNRAIGLHDPTAHAEIMALR QGGLVMQNYRLIDATLYVTFEPCVMCAGAMIHSRIGRVVFGVRNAKTGAAGSLMDVLHYPGMNH RVEITEGILADECAALLCYFFRMPRQVFNAQKKAQSSTD (SEQ ID NO: 1), or a corresponding position in another adenosine deaminase. In embodiments, ABE8 comprises alterations at amino acids 82 and/or 166 of SEQ ID NO: 1. In some embodiments, ABE8 comprises further alterations, as described herein, relative to the reference sequence.

[0038] By “Adenosine Base Editor 8 (ABE8) polynucleotide” is meant a polynucleotide encoding an ABE8 polypeptide.

[0039] “Administering” is referred to herein as providing one or more compositions described herein to a patient or a subject. By way of example and without limitation, composition administration (e.g., injection) can be performed by intravenous (i.v.) injection, subcutaneous (s.c.) injection, intradermal (i.d.) injection, intraperitoneal (i.p.) injection, or intramuscular (i.m.) injection. One or more such routes can be employed. Parenteral administration can be, for example, by bolus injection or by gradual perfusion over time. In some embodiments, parenteral administration includes infusing or injecting intravascularly, intravenously, intramuscularly, intraarterially, intrathecally, intratumorally, intradermally, intraperitoneally, transtracheally, subcutaneously, subcuticularly, intraarticularly, subcapsularly, subarachnoidly and intrasternally. Alternatively, or concurrently, administration can be by the oral route.

[0040] By “agent” is meant any small molecule chemical compound, antibody, nucleic acid molecule, polypeptide, or fragments thereof. In an embodiment, the agent is a base editor system described herein or a component thereof.

[0041] By “alteration” is meant a change in the level, structure, or activity of an analyte, gene or polypeptide as detected by standard art known methods such as those described herein. As used herein, an alteration includes a change (e.g., increase or reduction) in expression levels. In embodiments, the increase or reduction in expression levels is by 10%, 25%, 40%, 50% or greater. In some embodiments, an alteration includes an insertion, deletion, or substitution of a nucleobase or amino acid (by, e.g., genetic engineering).

[0042] By “ameliorate” is meant reduce, suppress, attenuate, diminish, arrest, or stabilize the development or progression of a disease. In embodiments, the disease is phenylketonuria (PKU), an autosomal recessive inborn error of metabolism associated with a deficiency of PAH. Editing of a PAH gene in a subject having PKU may ameliorate symptoms associated with the disease.

[0043] By “analog” is meant a molecule that is not identical but has analogous functional or structural features. For example, a polypeptide analog retains the biological activity of a corresponding naturally-occurring polypeptide, while having certain biochemical modifications that enhance the analog's function relative to a naturally occurring polypeptide. Such biochemical modifications could increase the analog's protease resistance, membrane permeability, or half-life, without altering, for example, ligand binding. An analog may include an unnatural amino acid.

[0044] By “base editor (BE),” or “nucleobase editor polypeptide (NBE)” is meant an agent that binds a polynucleotide and has nucleobase modifying activity. In various embodiments, the base editor comprises a nucleobase modifying polypeptide (e.g., a deaminase) and a polynucleotide programmable nucleotide binding domain (e.g., Cas9 or Cpf1). Representative nucleic acid and protein sequences of base editors include those sequences having about or at least about 85% sequence identity to any base editor sequence provided in the sequence listing, such as those corresponding to SEQ ID NOs: 2-11.

[0045] By “BE4 cytidine deaminase (BE4) polypeptide,” is meant a base editor comprising a nucleic acid programmable DNA binding protein (napDNAbp) domain, a cytidine deaminase domain, and two uracil glycosylase inhibitor domains (UGIs). In embodiments, the napDNAbp is a Cas9n (D10A) polypeptide. Non-limiting examples of cytidine deaminase domains include rAPOBEC, ppAPOBEC, RrA3F, AmAPOBEC1, and SsAPOBEC3B.

[0046] By “BE4 cytidine deaminase (BE4) polynucleotide,” is meant a polynucleotide encoding a BE4 polypeptide.

[0047] By “base editing activity” is meant acting to chemically alter a base within a polynucleotide. In one embodiment, a first base is converted to a second base. In one embodiment, the base editing activity is cytidine deaminase activity, e.g., converting target C⋅G to T⋅A. In another embodiment, the base editing activity is adenosine or adenine deaminase activity, e.g., converting A⋅T to G⋅C.

[0048] The term “base editor system” refers to an intermolecular complex for editing a nucleobase of a target nucleotide sequence. In various embodiments, the base editor (BE) system comprises (1) a polynucleotide programmable nucleotide binding domain, a deaminase domain (e.g., cytidine deaminase or adenosine deaminase) for deaminating nucleobases in the target nucleotide sequence; and (2) one or more guide polynucleotides (e.g., guide RNA) in conjunction with the polynucleotide programmable nucleotide binding domain. In various embodiments, the base editor (BE) system comprises a nucleobase editor domain selected from an adenosine deaminase or a cytidine deaminase, and a domain having nucleic acid sequence specific binding activity. In some embodiments, the base editor system comprises (1) a base editor (BE) comprising a polynucleotide programmable DNA binding domain and a deaminase domain for deaminating one or more nucleobases in a target nucleotide sequence; and (2) one or more guide RNAs in conjunction with the polynucleotide programmable DNA binding domain. In some embodiments, the polynucleotide programmable nucleotide binding domain is a polynucleotide programmable DNA binding domain. In some embodiments, the base editor is a cytidine base editor (CBE). In some embodiments, the base editor is an adenine or adenosine base editor (ABE). In some embodiments, the base editor is an adenine or adenosine base editor (ABE) or a cytidine or cytosine base editor (CBE). In some embodiments, the base editor system (e.g., a base editor system comprising a cytidine deaminase) comprises a uracil glycosylase inhibitor or other agent or peptide (e.g., a uracil stabilizing protein such as provided in WO2022015969, the disclosure of which is incorporated herein by reference in its entirety for all purposes) that inhibits the inosine base excision repair system.

[0049] The term “Cas9” or “Cas9 domain” refers to an RNA guided nuclease comprising a Cas9 protein, or a fragment thereof (e.g., a protein comprising an active, inactive, or partially active DNA cleavage domain of Cas9, and/or the gRNA binding domain of Cas9). A Cas9 nuclease is also referred to sometimes as a casnl nuclease or a CRISPR (clustered regularly interspaced short palindromic repeat) associated nuclease.

[0050] The term “conservative amino acid substitution” or “conservative mutation” refers to the replacement of one amino acid by another amino acid with a common property. A functional way to define common properties between individual amino acids is to analyze the normalized frequencies of amino acid changes between corresponding proteins of homologous organisms (Schulz, G. E. and Schirmer, R. H., Principles of Protein Structure, Springer-Verlag, New York (1979)). According to such analyses, groups of amino acids can be defined where amino acids within a group exchange preferentially with each other, and therefore resemble each other most in their impact on the overall protein structure (Schulz, G. E. and Schirmer, R. H., supra). Non-limiting examples of conservative mutations include amino acid substitutions of amino acids, for example, lysine for arginine and vice versa such that a positive charge can be maintained; glutamic acid for aspartic acid and vice versa such that a negative charge can be maintained; serine for threonine such that a free —OH can be maintained; and glutamine for asparagine such that a free —NH₂ can be maintained.

[0051] Amino acids generally can be grouped into classes according to the following common side-chain properties:
[0052] (1) hydrophobic: Norleucine, Met, Ala, Val, Leu, He;
[0053] (2) neutral hydrophilic: Cys, Ser, Thr, Asn, Gin;
[0054] (3) acidic: Asp, Glu;
[0055] (4) basic: His, Lys, Arg;
[0056] (5) residues that influence chain orientation: Gly, Pro;
[0057] (6) aromatic: Trp, Tyr, Phe.

[0058] In some embodiments, conservative substitutions can involve the exchange of a member of one of these classes for another member of the same class. In some embodiments, non-conservative amino acid substitutions can involve exchanging a member of one of these classes for another class.

[0059] The term “coding sequence” or “protein coding sequence” as used interchangeably herein refers to a segment of a polynucleotide that codes for a protein. Coding sequences can also be referred to as open reading frames. The region or sequence is bounded nearer the 5′ end by a start codon and nearer the 3′ end with a stop codon. Stop codons useful with the base editors described herein include the following: TAG, TAA, and TGA.

[0060] By “complex” is meant a combination of two or more molecules whose interaction relies on inter-molecular forces. Non-limiting examples of inter-molecular forces include covalent and non-covalent interactions. Non-limiting examples of non-covalent interactions include hydrogen bonding, ionic bonding, halogen bonding, hydrophobic bonding, van der Waals interactions (e.g., dipole-dipole interactions, dipole-induced dipole interactions, and London dispersion forces), and π-effects. In an embodiment, a complex comprises polypeptides, polynucleotides, or a combination of one or more polypeptides and one or more polynucleotides. In one embodiment, a complex comprises one or more polypeptides that associate to form a base editor (e.g., base editor comprising a nucleic acid programmable DNA binding protein, such as Cas9, and a deaminase) and a polynucleotide (e.g., a guide RNA). In an embodiment, the complex is held together by hydrogen bonds. It should be appreciated that one or more components of a base editor (e.g., a deaminase, or a nucleic acid programmable DNA binding protein) may associate covalently or non-covalently. As one example, a base editor may include a deaminase covalently linked to a nucleic acid programmable DNA binding protein (e.g., by a peptide bond). Alternatively, a base editor may include a deaminase and a nucleic acid programmable DNA binding protein that associate noncovalently (e.g., where one or more components of the base editor are supplied in trans and associate directly or via another molecule such as a protein or nucleic acid). In an embodiment, one or more components of the complex are held together by hydrogen bonds.

[0061] By “cytosine” or “4-Aminopyrimidin-2(1H)-one” is meant a purine nucleobase with the molecular formula C₄H₅N₃O, having the structure

[chemical structure]

and corresponding to CAS No. 71-30-7.

[0062] By “cytidine” is meant a cytosine molecule attached to a ribose sugar via a glycosidic bond, having the structure

[chemical structure]

and corresponding to CAS No. 65-46-3. Its molecular formula is C₉H₁₃N₃O₅.

[0063] By “Cytidine Base Editor (CBE)” is meant a base editor comprising a cytidine deaminase. Non-limiting examples of cytidine deaminase base editor amino acid sequences include amino acid sequences for BE4max (SEQ ID NO: 553), YE1-BE4 (SEQ ID NO: 554), YE2-BE4 (SEQ ID NO: 555), YEE-BE4 (SEQ ID NO: 556), EE-BE4 (SEQ ID NO: 557), R33A−BE4 (SEQ ID NO: 558), R33A+K34A-BE4 (SEQ ID NO: 559), APOBEC3A (A3A)-BE4 (SEQ ID NO: 560), APOBEC3B (A3B)-BE4 (SEQ ID NO: 561), APOBEC3G (A3G)-BE4 (SEQ ID NO: 562), AID-BE4 (SEQ ID NO: 563), CDA-BE4 (SEQ ID NO: 564), FERNY-BE4 (SEQ ID NO: 565), evolved APOBEC3A (eA3A)-BE4 (SEQ ID NO: 566), AALN-BE4 (SEQ ID NO: 567), BE4max modified with SpCas9-NG (SEQ ID NO: 568), YE1-SpCas9-NG (YE1-NG) (SEQ ID NO: 569), YE2-SpCas9-NG (SEQ ID NO: 570), YEE-SpCas9-NG (SEQ ID NO: 571), EE-SpCas9-NG (SEQ ID NO: 572), R33A+K34A-SpCas9-NG (SEQ ID NO: 573), YE1-CP1028 (YE1-BE4-CP1028, or YE1-CP) (SEQ ID NO: 574), YE2-CP1028 (YE2-BE4-CP1028) (SEQ ID NO: 575), YEE-CP1028 (YEE-BE4-CP1028) (SEQ ID NO: 576), EE-CP1028 (EE-BE4-CP1028) (SEQ ID NO: 577), R33A+K34A-CP1028 (R33A+K34A-BE4-CP1028) (SEQ ID NO: 578), BE4max (with nickase) (SEQ ID NO: 597), BE4 (SEQ ID NO: 598), BE4 with His tag (SEQ ID NO: 599), BE4max (SEQ ID NO: 600), AncBE4max 689 (SEQ ID NO: 601), and AncBE4max 687 (SEQ ID NO: 602).

[0064] By “Cytidine Base Editor (CBE) polynucleotide” is meant a polynucleotide encoding a CBE. Non-limiting examples of polynucleotide sequences encoding cytidine deaminase base editors include those encoding BE4max (SEQ ID NO: 616), AncBE4max689 (SEQ ID NO: 617), and AncBE4max687 (SEQ ID NO: 618).

[0065] By “cytidine deaminase” or “cytosine deaminase” is meant a polypeptide or fragment thereof capable of deaminating cytidine or cytosine. In embodiments, the cytidine or cytosine is present in a polynucleotide. In one embodiment, the cytidine deaminase converts cytosine to uracil or 5-methylcytosine to thymine. The terms “cytidine deaminase” and “cytosine deaminase” are used interchangeably throughout the application. Petromyzon marinus cytosine deaminase 1 (PmCDA1) (SEQ ID NO: 13-14), Activation-induced cytidine deaminase (AICDA) (SEQ ID NOs: 15-21), and APOBEC (SEQ ID NOs: 12-61) are exemplary cytidine deaminases. Further exemplary cytidine deaminase (CDA) sequences are provided in the Sequence Listing as SEQ ID NOs: 62-66 and SEQ ID NOs: 67-189. Non-limiting examples of cytidine deaminases include those described in PCT/US20/16288, PCT/US2018/021878, 180802-021804/PCT, PCT/US2018/048969, PCT/US2016/058344, PCT/US2020/062428, and PCT/US2019/033848, the disclosures of which are incorporated herein by reference in their entireties for all purposes. Non-limiting examples of cytidine deaminase amino acid sequences include amino acid sequences for Rat APOBEC1 (SEQ ID NO: 579), Human APOBEC1 (SEQ ID NO: 580), Human APOBEC3 (SEQ ID NO: 581), Human APOBEC3B (SEQ ID NO: 582), Human APOBEC3G (SEQ ID NO: 583), evoAPOBEC3A (eA3A) (SEQ ID NO: 584), evoCDA (SEQ ID NO: 585), evoAPOBEC1 (SEQ ID NO: 586), YE1 (SEQ ID NO: 587), YE2 (SEQ ID NO: 588), YEE (SEQ ID NO: 589), EE (SEQ ID NO: 590), R33A (SEQ ID NO: 591), R33A+K34A (SEQ ID NO: 592), AALN (SEQ ID NO: 593), FERNY (SEQ ID NO: 594), evoFERNY (SEQ ID NO: 595), APOBEC (SEQ ID NO: 619), Anc686 APOBEC (SEQ ID NO: 620), Human APOBEC-3G D316R_D317R (SEQ ID NO: 621), Human APOBEC-3G chain A (SEQ ID NO: 622), Human APOBEC3-G chain A D120R_D121R (SEQ ID NO: 623), Mouse APOBEC3 (SEQ ID NO: 624), Rat APOBEC3 (SEQ ID NO: 625), Rhesus macaque APOBEC-3G (SEQ ID NO: 626), Chimpanzee APOBEC-3G (SEQ ID NO: 627), Green Monkey APOBEC-3G (SEQ ID NO: 628), Human APOBEC-3G (SEQ ID NO: 629), Human APOBEC-3F (SEQ ID NO: 630), Human APOBEC-3B (SEQ ID NO: 631), Rat APOBEC-3B (SEQ ID NO: 632), Bovine APOBEC-3B (SEQ ID NO: 633), Chimpanzee APOBEC-3B (SEQ ID NO: 634), Gorilla APOBEC-3C (SEQ ID NO: 635), Human APOBEC-3A (SEQ ID NO: 636), Rhesus macaque APOBEC-3A (SEQ ID NO: 637), Bovine APOBEC-3A (SEQ ID NO: 638), Human APOBEC-3H (SEQ ID NO: 639), Human APOBEC-3D (SEQ ID NO: 640), Rat ABOPEC1 (SEQ ID NO: 641), Anc689 APOBEC (SEQ ID NO: 642), Anc687 APOBEC (SEQ ID NO: 643), Anc686 APOBEC (SEQ ID NO: 644), Anc655 APOBEC (SEQ ID NO: 645), and Anc733 APOBEC (SEQ ID NO: 646).

[0066] By “cytidine deaminase polynucleotide” is meant a polynucleotide encoding a cytidine deaminase. Non-limiting examples of polynucleotide sequences encoding cytidine deaminase domains include those encoding Rat APOBEC1 (SEQ ID NO: 604), Anc689 APOBEC (SEQ ID NO: 605), Anc687 APOBEC (SEQ ID NO: 606), Anc686 APOBEC (SEQ ID NO: 607), Anc655 APOBEC (SEQ ID NO: 608), Anc733 APOBEC (SEQ ID NO: 609), Rat APOBEC1 (SEQ ID NO: 610), Anc689 APOBEC (SEQ ID NO: 611), Anc687 APOBEC (SEQ ID NO: 612), Anc686 APOBEC (SEQ ID NO: 613), Anc655 APOBEC (SEQ ID NO: 614), and Anc733 APOBEC (SEQ ID NO: 615).

[0067] By “cytosine deaminase activity” is meant catalyzing the deamination of cytosine or cytidine. In one embodiment, a polypeptide having cytosine deaminase activity converts an amino group to a carbonyl group. In an embodiment, a cytosine deaminase converts cytosine to uracil (i.e., C to U) or 5-methylcytosine to thymine (i.e., 5mC to T). In some embodiments, a cytosine deaminase as provided herein has increased cytosine deaminase activity (e.g., at least 10-fold, 20-fold, 30-fold, 40-fold, 50-fold, 60-fold, 70-fold, 80-fold, 90-fold, 100-fold or more) relative to a reference cytosine deaminase.

[0068] The term “deaminase” or “deaminase domain,” as used herein, refers to a protein or fragment thereof that catalyzes a deamination reaction.

[0069] The term, “detect” refers to identifying the presence, absence or amount of the analyte to be detected. In one embodiment, a sequence alteration in a polynucleotide or polypeptide is detected. In another embodiment, the presence of indels is detected. In one embodiment, PAH activity is detected. In another embodiment, levels of Phe in a biological sample (e.g., blood, serum, plasma, tissue) are detected.

[0070] By “detectable label” is meant a composition that when linked to a molecule of interest renders the latter detectable, via spectroscopic, photochemical, biochemical, immunochemical, or chemical means. For example, useful labels include radioactive isotopes, magnetic beads, metallic beads, colloidal particles, fluorescent dyes, electron-dense reagents, enzymes (for example, as commonly used in an enzyme linked immunosorbent assay (ELISA)), biotin, digoxigenin, or haptens.

[0071] By “disease” is meant any condition or disorder that damages or interferes with the normal function of a cell, tissue, or organ. Exemplary diseases include phenylketonuria.

[0072] By “dual editing activity” or “dual deaminase activity” is meant having adenosine deaminase and cytidine deaminase activity. In one embodiment, a base editor having dual editing activity has both A→G and C→T activity, wherein the two activities are approximately equal or are within about 10% or 20% of each other. In another embodiment, a dual editor has A→G activity that no more than about 10% or 20% greater than C→T activity. In another embodiment, a dual editor has A→G activity that is no more than about 10% or 20% less than C→T activity. In some embodiments, the adenosine deaminase variant has predominantly cytosine deaminase activity, and little, if any, adenosine deaminase activity. In some embodiments, the adenosine deaminase variant has cytosine deaminase activity, and no significant or no detectable adenosine deaminase activity. Non-limiting examples of proteins having dual deaminase activity include those described in International Patent Application Publications No. WO 2024/040083 and WO 2022/204574, the disclosures of which are hereby incorporated by reference in their entireties for all purposes.

[0073] By “effective amount” is meant the amount of an agent (e.g., a base editor, cell) as described herein, that is required to ameliorate the symptoms of a disease relative to an untreated patient or an individual without disease, i.e., a healthy individual, or is the amount of the agent sufficient to elicit a desired biological response. The effective amount of active compound(s) used to practice embodiments of the present disclosure for therapeutic treatment of a disease varies depending upon the manner of administration, the age, body weight, and general health of the subject. Ultimately, the attending physician or veterinarian will decide the appropriate amount and dosage regimen. Such amount is referred to as an “effective” amount. In one embodiment, an effective amount is the amount of a base editor of the disclosure sufficient to introduce an alteration in a gene of interest in a cell (e.g., a cell in vitro or in vivo). In one embodiment, an effective amount is the amount of a base editor required to achieve a therapeutic effect. Such therapeutic effect need not be sufficient to alter a pathogenic gene in all cells of a subject, tissue or organ, but only to alter the pathogenic gene in about 1%, 5%, 10%, 25%, 50%, 75% or more of the cells present in a subject, tissue or organ. In one embodiment, an effective amount is sufficient to ameliorate one or more symptoms of a disease. For example, an effective amount of a base editor described herein is delivered to a tissue of a patient where it increases the level of PAH expression, thereby reducing the accumulation of Phe in the serum of the patient.

[0074] By “fragment” is meant a portion of a polypeptide or nucleic acid molecule. This portion contains, at least about 10%, 20%, 30%, 40%, 50%, 60%, 70%, 80%, or 90% of the entire length of the reference nucleic acid molecule or polypeptide. A fragment may contain 10, 20, 30, 40, 50, 60, 70, 80, 90, or 100, 200, 300, 400, 500, 600, 700, 800, 900, or 1000 nucleotides or amino acids. In some embodiments, the fragment is a functional fragment.

[0075] By “guide polynucleotide” is meant a polynucleotide or polynucleotide complex which is specific for a target sequence and can form a complex with a polynucleotide programmable nucleotide binding domain protein (e.g., Cas9 or Cpf1). In an embodiment, the guide polynucleotide is a guide RNA (gRNA). gRNAs can exist as a complex of two or more RNAs, or as a single RNA molecule.

[0076] “Hybridization” means hydrogen bonding, which may be Watson-Crick, Hoogsteen or reversed Hoogsteen hydrogen bonding, between complementary nucleobases. For example, adenine and thymine are complementary nucleobases that pair through the formation of hydrogen bonds.

[0077] By “increase” is meant a positive alteration of at least 10%, 25%, 50%, 75%, or 100%, or about 1.5 fold, about 2 fold, about 3-fold, about 4-fold, about 5-fold, about 6-fold, about 7-fold, about 8-fold, about 9-fold, about 10-fold, about 15-fold, about 20-fold, about 25-fold, about 30-fold, about 35-fold, about 40-fold, about 45-fold, about 50-fold, or about 100-fold. In embodiments, expression of a base editor described herein increases expression of PAH in a tissue of a subject.

[0078] The terms “inhibitor of base repair”, “base repair inhibitor”, “IBR” or their grammatical equivalents refer to a protein that is capable in inhibiting the activity of a nucleic acid repair enzyme, for example a base excision repair enzyme.

[0079] An “intein” is a fragment of a protein that is able to excise itself and join the remaining fragments (the exteins) with a peptide bond in a process known as protein splicing.

[0080] The terms “isolated,” “purified,” or “biologically pure” refer to material that is free to varying degrees from components which normally accompany it as found in its native state. “Isolate” denotes a degree of separation from original source or surroundings. “Purify” denotes a degree of separation that is higher than isolation. A “purified” or “biologically pure” protein is sufficiently free of other materials such that any impurities do not materially affect the biological properties of the protein or cause other adverse consequences. That is, a nucleic acid or peptide of this disclosure is purified if it is substantially free of cellular material, viral material, or culture medium when produced by recombinant DNA techniques, or chemical precursors or other chemicals when chemically synthesized. Purity and homogeneity are typically determined using analytical chemistry techniques, for example, polyacrylamide gel electrophoresis or high performance liquid chromatography. The term “purified” can denote that a nucleic acid or protein gives rise to essentially one band in an electrophoretic gel. For a protein that can be subjected to modifications, for example, phosphorylation or glycosylation, different modifications may give rise to different isolated proteins, which can be separately purified.

[0081] By “isolated polynucleotide” is meant a nucleic acid molecule that is free of the genes which, in the naturally-occurring genome of the organism from which the nucleic acid molecule of the disclosure is derived, flank the gene. The term therefore includes, for example, a recombinant DNA that is incorporated into a vector; into an autonomously replicating plasmid or virus; or into the genomic DNA of a prokaryote or eukaryote; or that exists as a separate molecule (for example, a cDNA or a genomic or cDNA fragment produced by PCR or restriction endonuclease digestion) independent of other sequences. In addition, the term includes an RNA molecule that is transcribed from a DNA molecule, as well as a recombinant DNA that is part of a hybrid gene encoding additional polypeptide sequence.

[0082] By an “isolated polypeptide” is meant a polypeptide of the disclosure that has been separated from components that naturally accompany it. Typically, the polypeptide is isolated when it is at least 60%, by weight, free from the proteins and naturally-occurring organic molecules with which it is naturally associated. In embodiments, the preparation is at least 75%, at least 90%, or at least 99%, by weight, a polypeptide of the disclosure. An isolated polypeptide of the disclosure may be obtained, for example, by extraction from a natural source, by expression of a recombinant nucleic acid encoding such a polypeptide; or by chemically synthesizing the protein. Purity can be measured by any appropriate method, for example, column chromatography, polyacrylamide gel electrophoresis, or by HPLC analysis.

[0083] The term “linker”, as used herein, refers to a molecule that links two moieties. In one embodiment, the term “linker” refers to a covalent linker (e.g., covalent bond) or a non-covalent linker.

[0084] By “marker” is meant any protein or polynucleotide having an alteration in expression, level, structure, or activity that is associated with a disease or disorder. In an embodiment, the level of Phe in a sample (e.g., blood, serum, plasma, tissue) is a marker of PKU.

[0085] The term “mutation,” as used herein, refers to a substitution of a residue within a sequence, e.g., a nucleic acid or amino acid sequence, with another residue, or a deletion or insertion of one or more residues within a sequence. Mutations are typically described herein by identifying the original residue followed by the position of the residue within the sequence and by the identity of the newly substituted residue. Various methods for making the amino acid substitutions (mutations) provided herein are well known in the art, and are provided by, for example, Green and Sambrook, Molecular Cloning: A Laboratory Manual (4^{th} ed., Cold Spring Harbor Laboratory Press, Cold Spring Harbor, N.Y. (2012)).

[0086] The terms “nucleic acid” and “nucleic acid molecule,” as used herein, refer to a compound comprising a nucleobase and an acidic moiety, e.g., a nucleoside, a nucleotide, or a polymer of nucleotides. Typically, polymeric nucleic acids, e.g., nucleic acid molecules comprising three or more nucleotides are linear molecules, in which adjacent nucleotides are linked to each other via a phosphodiester linkage. In some embodiments, “nucleic acid” refers to individual nucleic acid residues (e.g., nucleotides and/or nucleosides). In some embodiments, “nucleic acid” refers to an oligonucleotide chain comprising three or more individual nucleotide residues. As used herein, the terms “oligonucleotide” and “polynucleotide” can be used interchangeably to refer to a polymer of nucleotides (e.g., a string of at least three nucleotides). In some embodiments, “nucleic acid” encompasses RNA as well as single and/or double-stranded DNA. Nucleic acids may be naturally occurring, for example, in the context of a genome, a transcript, an mRNA, tRNA, rRNA, siRNA, snRNA, a plasmid, cosmid, chromosome, chromatid, or other naturally occurring nucleic acid molecule. On the other hand, a nucleic acid molecule may be a non-naturally occurring molecule, e.g., a recombinant DNA or RNA, an artificial chromosome, an engineered genome, or fragment thereof, or a synthetic DNA, RNA, DNA/RNA hybrid, or including non-naturally occurring nucleotides or nucleosides. Furthermore, the terms “nucleic acid,” “DNA,” “RNA,” and/or similar terms include nucleic acid analogs, e.g., analogs having other than a phosphodiester backbone. Nucleic acids can be purified from natural sources, produced using recombinant expression systems and optionally purified, chemically synthesized, etc. Where appropriate, e.g., in the case of chemically synthesized molecules, nucleic acids comprise nucleoside analogs such as analogs having chemically modified bases or sugars, and backbone modifications. A nucleic acid sequence is presented in the 5′ to 3′ direction unless otherwise indicated. In some embodiments, a nucleic acid is or comprises natural nucleosides (e.g. adenosine, thymidine, guanosine, cytidine, uridine, deoxyadenosine, deoxythymidine, deoxyguanosine, and deoxycytidine); nucleoside analogs (e.g., 2-aminoadenosine, 2-thiothymidine, inosine, pyrrolo-pyrimidine, 3-methyl adenosine, 5-methylcytidine, 2-aminoadenosine, C5-bromouridine, C5-fluorouridine, C5-iodouridine, C5-propynyl-uridine, C5-propynyl-cytidine, C5-methylcytidine, 2-aminoadenosine, 7-deazaadenosine, 7-deazaguanosine, 8-oxoadenosine, 8-oxoguanosine, O(6)-methylguanine, and 2-thiocytidine); chemically modified bases; biologically modified bases (e.g., methylated bases); intercalated bases; modified sugars (e.g., 2′-fluororibose, ribose, 2′-deoxyribose, arabinose, and hexose); and/or modified phosphate groups (e.g., phosphorothioates and 5′-N-phosphoramidite linkages).

[0087] The term “nuclear localization sequence,” “nuclear localization signal,” or “NLS” refers to an amino acid sequence that promotes import of a protein into the cell nucleus. Nuclear localization sequences are known in the art and described, for example, in Plank et al., International PCT application, PCT/EP2000/011690, filed Nov. 23, 2000, published as WO/2001/038547 on May 31, 2001, the contents of which are incorporated herein by reference for their disclosure of exemplary nuclear localization sequences. In other embodiments, the NLS is an optimized NLS described, for example, by Koblan et al., Nature Biotech. 2018 doi: 10.1038/nbt.4172. In some embodiments, an NLS comprises the amino acid sequence

(SEQ ID NO: 190)
KRTADGSEFESPKKKRKV,
(SEQ ID NO: 191)
KRPAATKKAGQAKKKK,
(SEQ ID NO: 192)
KKTELQTTNAENKTKKL,
(SEQ ID NO: 193)
KRGINDRNFWRGENGRKTR,
(SEQ ID NO: 194)
RKSGKIAAIVVKRPRK,
(SEQ ID NO: 195)
PKKKRKV,
(SEQ ID NO: 196)
MDSLLMNRRKFLYQFKNVRWAKGRRETYLC,
(SEQ ID NO: 328)
PKKKRKVEGADKRTADGSEFESPKKKRKV,
or
(SEQ ID NO: 329)
RKSGKIAAIVVKRPRKPKKKRKV.

[0088] The term “nucleobase,” “nitrogenous base,” or “base,” used interchangeably herein, refers to a nitrogen-containing biological compound that forms a nucleoside, which in turn is a component of a nucleotide. The ability of nucleobases to form base pairs and to stack one upon another leads directly to long-chain helical structures such as ribonucleic acid (RNA) and deoxyribonucleic acid (DNA). Five nucleobases—adenine (A), cytosine (C), guanine (G), thymine (T), and uracil (U)—are called primary or canonical. Adenine and guanine are derived from purine, and cytosine, uracil, and thymine are derived from pyrimidine. DNA and RNA can also contain other (non-primary) bases that are modified. Non-limiting exemplary modified nucleobases can include hypoxanthine, xanthine, 7-methylguanine, 5,6-dihydrouracil, 5-methylcytosine (m5C), and 5-hydromethylcytosine. Hypoxanthine and xanthine can be created through mutagen presence, both of them through deamination (replacement of the amine group with a carbonyl group). Hypoxanthine can be modified from adenine. Xanthine can be modified from guanine. Uracil can result from deamination of cytosine. A “nucleoside” consists of a nucleobase and a five carbon sugar (either ribose or deoxyribose). Examples of a nucleoside include adenosine, guanosine, uridine, cytidine, 5-methyluridine (m5U), deoxyadenosine, deoxyguanosine, thymidine, deoxyuridine, and deoxycytidine. Examples of a nucleoside with a modified nucleobase includes inosine (I), xanthosine (X), 7-methylguanosine (m7G), dihydrouridine (D), 5-methylcytidine (m5C), and pseudouridine (I). A “nucleotide” consists of a nucleobase, a five carbon sugar (either ribose or deoxyribose), and at least one phosphate group. Non-limiting examples of modified nucleobases and/or chemical modifications that a modified nucleobase may include are the following: pseudo-uridine, 5-Methyl-cytosine, 2′-O-methyl-3′-phosphonoacetate, 2′-O-methyl thioPACE (MSP), 2′-O-methyl-PACE (MP), 2′-fluoro RNA (2′-F-RNA), constrained ethyl (S-cEt), 2′-O-methyl (‘M’), 2′-O-methyl-3′-phosphorothioate (‘MS’), 2′-O-methyl-3′-thiophosphonoacetate (‘MSP’), 5-methoxyuridine, phosphorothioate, and N1-Methylpseudouridine.

[0089] The term “nucleic acid programmable DNA binding protein” or “napDNAbp” may be used interchangeably with “polynucleotide programmable nucleotide binding domain” to refer to a protein that associates with a nucleic acid (e.g., DNA or RNA), such as a guide nucleic acid or guide polynucleotide (e.g., gRNA), that guides the napDNAbp to a specific nucleic acid sequence. In some embodiments, the polynucleotide programmable nucleotide binding domain is a polynucleotide programmable DNA binding domain. In some embodiments, the polynucleotide programmable nucleotide binding domain is a polynucleotide programmable RNA binding domain. In some embodiments, the polynucleotide programmable nucleotide binding domain is a Cas9 protein. A Cas9 protein can associate with a guide RNA that guides the Cas9 protein to a specific DNA sequence that is complementary to the guide RNA. In some embodiments, the napDNAbp is a Cas9 domain, for example a nuclease active Cas9, a Cas9 nickase (nCas9), or a nuclease inactive Cas9 (dCas9). Non-limiting examples of nucleic acid programmable DNA binding proteins include, Cas9 (e.g., dCas9 and nCas9), Cas12a/Cpf1, Cas12b/C2c1, Cas12c/C2c3, Cas12d/CasY, Cas12e/CasX, Cas12g, Cas12h, Cas12i, and Cas12j/CasΦ (Cas12j/Casphi). Non-limiting examples of Cas enzymes include Cas1, Cas1B, Cas2, Cas3, Cas4, Cas5, Cas5d, Cas5t, Cas5h, Cas5a, Cas6, Cas7, Cas8, Cas8a, Cas8b, Cas8c, Cas9 (also known as Csn1 or Csx12), Cas10, Cas10d, Cas12a/Cpf1, Cas12b/C2c1, Cas12c/C2c3, Cas12d/CasY, Cas12e/CasX, Cas12g, Cas12h, Cas12i, Cas12j/CasΦ, Cpf1, Csy1, Csy2, Csy3, Csy4, Cse1, Cse2, Cse3, Cse4, Cse5e, Csc1, Csc2, Csa5, Csn1, Csn2, Csm1, Csm2, Csm3, Csm4, Csm5, Csm6, Cmr1, Cmr3, Cmr4, Cmr5, Cmr6, Csb1, Csb2, Csb3, Csx17, Csx14, Csx10, Csx16, CsaX, Csx3, Csx1, Csx1S, Csx11, Csf1, Csf2, CsO, Csf4, Csd1, Csd2, Cst1, Cst2, Csh1, Csh2, Csa1, Csa2, Csa3, Csa4, Csa5, Type II Cas effector proteins, Type V Cas effector proteins, Type VI Cas effector proteins, CARF, DinG, homologues thereof, or modified or engineered versions thereof. Other nucleic acid programmable DNA binding proteins are also within the scope of this disclosure, although they may not be specifically listed in this disclosure. See, e.g., Makarova et al. “Classification and Nomenclature of CRISPR-Cas Systems: Where from Here?” CRISPR J. 2018 October; 1:325-336. doi: 10.1089/crispr.2018.0033; Yan et al., “Functionally diverse type V CRISPR-Cas systems” Science. 2019 Jan. 4; 363 (6422): 88-91. doi: 10.1126/science.aav7271, the entire contents of each are hereby incorporated by reference. Exemplary nucleic acid programmable DNA binding proteins and nucleic acid sequences encoding nucleic acid programmable DNA binding proteins are provided in the Sequence Listing as SEQ ID NOs: 197-231, 232-245, 254-257, 260, and 378. In some embodiments, the napDNAbp is a (CRISPR-associated system) Cas9 endonuclease, for example, Cas9 (Csn1) from Streptococcus pyogenes (e.g., SEQ ID NO: 197), Cas9 from Neisseria meningitidis (NmeCas9; SEQ ID NO: 208), Nme2Cas9 (SEQ ID NO: 209), Streptococcus constellatus (ScoCas9), or derivatives thereof (e.g., a sequence with at least about 85% sequence identity to a Cas9, such as Nme2Cas9 or spCas9). Further non-limiting examples of nucleic acid programmable DNA binding proteins include those disclosed or referenced in Rufflow, et al., “Design of highly functional genome editors by modeling of the universe of CRISPR-Cas Sequences,” bioRxiv, posted Apr. 22, 2024, doi: 10.1101/2024.04.22.590591, the disclosure of which is incorporated herein by reference in its entirety for all purposes, which were designed using artificial intelligence. In some embodiments, the napDNAbp is OpenCRISPR-1, or a variant thereof (e.g., a variant comprising a D10A amino acid alteration and/or lacking an N-terminal methionine). Further non-limiting examples of nucleic acid programmable DNA binding proteins include those disclosed in International Patent Application No. PCT/US2019/047996.

[0090] The terms “nucleobase editing domain” or “nucleobase editing protein,” as used herein, refers to a protein or enzyme that can catalyze a nucleobase modification in RNA or DNA, such as cytosine (or cytidine) to uracil (or uridine) or thymine (or thymidine), and adenine (or adenosine) to hypoxanthine (or inosine) deaminations, as well as non-templated nucleotide additions and insertions. In some embodiments, the nucleobase editing domain is a deaminase domain (e.g., an adenine deaminase or an adenosine deaminase; or a cytidine deaminase or a cytosine deaminase).

[0091] By “OpenCRISPR-1 polypeptide” is meant a protein with an amino acid sequence having at least about 85% amino acid sequence identity to SEQ ID NO: 463, or a fragment thereof that associates with a nucleic acid, such as a guide nucleic acid or guide polynucleotide, that guides the napDNAbp to a specific nucleic acid sequence. Further details relating to the OpenCRISPR-1 polypeptide are disclosed in Rufflow, et al., “Design of highly functional genome editors by modeling of the universe of CRISPR-Cas Sequences,” bioRxiv, posted Apr. 22, 2024, doi: 10.1101/2024.04.22.590591, the disclosure of which is incorporated herein by reference in its entirety for all purposes.

[0092] By “OpenCRISPR-1 polynucleotide” is meant a nucleic acid molecule encoding an OpenCRISPR-1 polypeptide, as well as the introns, exons, 3′ untranslated regions, 5′ untranslated regions, and regulatory sequences associated with its expression, or fragments thereof. In embodiments, an OpenCRISPR-1 polynucleotide is the genomic sequence, cDNA, mRNA, or gene associated with and/or required for OpenCRISPR-1 expression. An exemplary OpenCRISPR-1 nucleotide sequence is provided at SEQ ID NO: 464.

[0093] In various embodiments, a guide RNA suitable for use in combination with an OpenCRISPR-1 polypeptide contains a scaffold having at least 85% sequence identity to a nucleotide sequence selected from the following, or fragments thereof capable of binding to an OpenCRISPR-1 polypeptide:

(SEQ ID NO: 465)
GUUUUAGAGCUGUGUUGAAAAACACAGCAAGUUAAAAUAAGGCUU
UGUCCGUAUCCAACUUGAAAAAGUGAGCACCGAUUCGGUGC;
(SEQ ID NO: 466)
GUUUUAGAGCUGGAAACAGCAAGUUAAAAUAAGGCUUUGUCCGUA
UCCAACUUGAAAAAGUGAGCACCGAUUCGGUGC;
and
(SEQ ID NO: 467)
GUUUUAGAGCUAGAAAUAGCAAGUUAAAAUAAGGCUAGUCCGUUA
UCAACUUGAAAAAGUGGCACCGAGUCGGUGC

[0094] As used herein, “obtaining” as in “obtaining an agent” includes synthesizing, purchasing, or otherwise acquiring the agent.

[0095] By “subject” or “patient” is meant a mammal, including, but not limited to, a human or non-human mammal. In embodiments, the mammal is a bovine, equine, canine, ovine, rabbit, rodent, nonhuman primate, or feline. In an embodiment, “patient” refers to a mammalian subject with a higher than average likelihood of developing a disease or a disorder. Exemplary patients can be humans, non-human primates, cats, dogs, pigs, cattle, cats, horses, camels, llamas, goats, sheep, rodents (e.g., mice, rabbits, rats, or guinea pigs) and other mammalians that can benefit from the therapies disclosed herein. Exemplary human patients can be male and/or female.

[0096] “Patient in need thereof” or “subject in need thereof” is referred to herein as a patient diagnosed with, at risk or having, predetermined to have, or suspected of having a disease or disorder.

[0097] The terms “pathogenic mutation”, “pathogenic variant”, “disease causing mutation”, “disease causing variant”, “deleterious mutation”, or “predisposing mutation” refers to a genetic alteration or mutation that is associated with a disease or disorder or that increases an individual's susceptibility or predisposition to a certain disease or disorder. In some embodiments, the pathogenic mutation comprises at least one wild-type amino acid substituted by at least one pathogenic amino acid in a protein encoded by a gene. In some embodiments, the pathogenic mutation is in a terminating region (e.g., stop codon). In some embodiments, the pathogenic mutation is in a non-coding region (e.g., intron, promoter, etc.).

[0098] The terms “protein”, “peptide”, “polypeptide”, and their grammatical equivalents are used interchangeably herein, and refer to a polymer of amino acid residues linked together by peptide (amide) bonds. A protein, peptide, or polypeptide can be naturally occurring, recombinant, or synthetic, or any combination thereof.

[0099] The term “fusion protein” as used herein refers to a hybrid polypeptide which comprises protein domains from at least two different proteins.

[0100] The term “recombinant” as used herein in the context of proteins or nucleic acids refers to proteins or nucleic acids that do not occur in nature but are the product of human engineering. For example, in some embodiments, a recombinant protein or nucleic acid molecule comprises an amino acid or nucleotide sequence that comprises at least one, at least two, at least three, at least four, at least five, at least six, or at least seven mutations as compared to any naturally occurring sequence.

[0101] By “reduces” is meant a negative alteration of at least 10%, 25%, 50%, 75%, or 100%. In embodiments, a base editor system of the disclosure reduces and/or normalizes levels of Phe in a biological sample of the subject.

[0102] By “reference” is meant a standard or control condition. In one embodiment, the reference is the level of Phe present in the blood of a subject not having PKU. In another embodiment, the reference is the level of Phe present in the blood of a subject having PKU prior to treatment. In another embodiment, the reference is a number that describes an ideal range for Phe levels in blood. In other embodiments and without limitation, a reference is an untreated cell that is not subjected to a test condition, or is subjected to placebo or normal saline, medium, buffer, and/or a control vector that does not harbor a polynucleotide of interest. In embodiments, a reference is a base editor system containing a base editor polypeptide and/or guide polynucleotide that differs from that of a base editor system of interest.

[0103] A “reference sequence” is a defined sequence used as a basis for sequence comparison. A reference sequence may be a subset of or the entirety of a specified sequence; for example, a segment of a full-length cDNA or gene sequence, or the complete cDNA or gene sequence. For polypeptides, the length of the reference polypeptide sequence will generally be at least about 16 amino acids, at least about 20 amino acids, at least about 25 amino acids, about 35 amino acids, about 50 amino acids, or about 100 amino acids. For nucleic acids, the length of the reference nucleic acid sequence will generally be at least about 50 nucleotides, at least about 60 nucleotides, at least about 75 nucleotides, about 100 nucleotides or about 300 nucleotides or any integer thereabout or therebetween. In some embodiments, a reference sequence is a wild-type sequence of a protein of interest. In other embodiments, a reference sequence is a polynucleotide sequence encoding a wild-type protein.

[0104] The term “RNA-programmable nuclease,” and “RNA-guided nuclease” refer to a nuclease that forms a complex with (e.g., binds or associates with) one or more RNA(s) that is not a target for cleavage. In some embodiments, an RNA-programmable nuclease, when in a complex with an RNA, may be referred to as a nuclease-RNA complex. Typically, the bound RNA(s) is referred to as a guide RNA (gRNA).

[0105] The term “single nucleotide polymorphism (SNP)” refers to a variation in a single nucleotide that occurs at a specific position in the genome, where each variation is present to some appreciable degree within a population (e.g., >1%). SNPs can fall within coding regions of genes, non-coding regions of genes, or in the intergenic regions (regions between genes). In some embodiments, SNPs within a coding sequence do not necessarily change the amino acid sequence of the protein that is produced, due to degeneracy of the genetic code. SNPs in the coding region are of two types: synonymous and nonsynonymous SNPs. Synonymous SNPs do not affect the protein sequence, while nonsynonymous SNPs change the amino acid sequence of protein. The nonsynonymous SNPs are of two types: missense and nonsense. SNPs that are not in protein-coding regions can still affect gene splicing, transcription factor binding, messenger RNA degradation, or the sequence of noncoding RNA. Gene expression affected by this type of SNP is referred to as an eSNP (expression SNP) and can be upstream or downstream from the gene. A single nucleotide variant (SNV) is a variation in a single nucleotide without any limitations of frequency and can arise in somatic cells. A somatic single nucleotide variation can also be called a single-nucleotide alteration.

[0106] By “specifically binds” is meant a nucleic acid molecule, polypeptide, polypeptide/polynucleotide complex, compound, or molecule that recognizes and binds a polypeptide and/or nucleic acid molecule of the disclosure, but which does not substantially recognize and bind other molecules in a sample, for example, a biological sample.

[0107] By “substantially identical” is meant a polypeptide or nucleic acid molecule exhibiting at least 50% identity to a reference amino acid sequence. In one embodiment, a reference sequence is a wild-type amino acid or nucleic acid sequence. In another embodiment, a reference sequence is any one of the amino acid or nucleic acid sequences described herein. In one embodiment, such a sequence is at least about 60%, 80%, 85%, 90%, 95%, 96%, 97%, 98%, 99%, 99.9%, or even 99.99%, identical at the amino acid level or nucleic acid level to the sequence used for comparison.

[0108] Sequence identity is typically measured using sequence analysis software (for example, Sequence Analysis Software Package of the Genetics Computer Group, University of Wisconsin Biotechnology Center, 1710 University Avenue, Madison, Wis. 53705, BLAST, BESTFIT, GAP, or PILEUP/PRETTYBOX programs). Such software matches identical or similar sequences by assigning degrees of homology to various substitutions, deletions, and/or other modifications. Conservative substitutions typically include substitutions within the following groups: glycine, alanine; valine, isoleucine, leucine; aspartic acid, glutamic acid, asparagine, glutamine; serine, threonine; lysine, arginine; and phenylalanine, tyrosine.

[0109] Nucleic acid molecules useful in the methods of the disclosure include any nucleic acid molecule that encodes a polypeptide of the disclosure or a functional fragment thereof. Such nucleic acid molecules need not be 100% identical with an endogenous nucleic acid sequence but will typically exhibit substantial identity. Polynucleotides having “substantial identity” to an endogenous sequence are typically capable of hybridizing with at least one strand of a double-stranded nucleic acid molecule. Nucleic acid molecules useful in the methods of the disclosure include any nucleic acid molecule that encodes a polypeptide of the disclosure or a functional fragment thereof. Such nucleic acid molecules need not be 100% identical with an endogenous nucleic acid sequence but will typically exhibit substantial identity. Polynucleotides having “substantial identity” to an endogenous sequence are typically capable of hybridizing with at least one strand of a double-stranded nucleic acid molecule. By “hybridize” is meant pair to form a double-stranded molecule between complementary polynucleotide sequences (e.g., a gene described herein), or portions thereof, under various conditions of stringency. (See, e.g., Wahl, G. M. and S. L. Berger (1987) Methods Enzymol. 152:399; Kimmel, A. R. (1987) Methods Enzymol. 152:507).

[0110] By “split” is meant divided into two or more fragments.

[0111] A “split polypeptide” or “split protein” refers to a protein that is provided as an N-terminal fragment and a C-terminal fragment translated as two separate polypeptides from a nucleotide sequence(s). The polypeptides corresponding to the N-terminal portion and the C-terminal portion of the split protein may be spliced in some embodiments to form a “reconstituted” protein. In embodiments, the split polypeptide is a nucleic acid programmable DNA binding protein (e.g. a Cas9) or a base editor.

[0112] The term “target site” refers to a nucleotide sequence or nucleobase of interest within a nucleic acid molecule that is modified. In embodiments, the modification is deamination of a base. The deaminase can be a cytidine or an adenine deaminase. The fusion protein or base editing complex comprising a deaminase may comprise a dCas9-adenosine deaminase fusion protein, a Cas 12b-adenosine deaminase fusion, or a base editor disclosed herein.

[0113] As used herein, the terms “treat,” treating,” “treatment,” and the like refer to reducing or ameliorating a disorder and/or symptoms associated therewith or obtaining a desired pharmacologic and/or physiologic effect. It will be appreciated that, although not precluded, treating a disorder or condition does not require that the disorder, condition or symptoms associated therewith be completely eliminated. In some embodiments, the effect is therapeutic, i.e., without limitation, the effect partially or completely reduces, diminishes, abrogates, abates, alleviates, reduces the intensity of, or cures a disease and/or adverse symptom attributable to the disease. In some embodiments, the effect is preventative, i.e., the effect protects or prevents an occurrence or reoccurrence of a disease or condition. To this end, the presently disclosed methods comprise administering a therapeutically effective amount of a composition as described herein.

[0114] By “uracil glycosylase inhibitor” or “UGI” is meant an agent that inhibits the uracil-excision repair system. Base editors comprising a cytidine deaminase convert cytosine to uracil, which is then converted to thymine through DNA replication or repair. In various embodiments, a uracil DNA glycosylase (UGI) prevent base excision repair which changes the U back to a C. In some instances, contacting a cell and/or polynucleotide with a UGI and a base editor prevents base excision repair which changes the U back to a C. An exemplary UGI comprises an amino acid sequence as follows:

>splP14739IUNGI_BPPB2 Uracil-DNA Glycosylase Inhibitor

(SEQ ID NO: 231)
MTNLSDIIEKETGKQLVIQESILMLPEEVEEVIGNKPESDILVHT
AYDESTDENVMLLTSDAPEYKPWALVIQDSNGENKIKML.

[0115] In some embodiments, the agent inhibiting the uracil-excision repair system is a uracil stabilizing protein (USP). See, e.g., WO 2022015969 A1, incorporated herein by reference.

[0116] As used herein, the term “vector” refers to a means of introducing a nucleic acid molecule into a cell, resulting in a transformed cell. Vectors include plasmids, transposons, phages, viruses, liposomes, lipid nanoparticles, and episomes.

[0117] Ranges provided herein are understood to be shorthand for all of the values within the range. For example, a range of 1 to 50 is understood to include any number, combination of numbers, or sub-range from the group consisting 1, 2, 3, 4, 5, 6, 7, 8, 9, 10, 11, 12, 13, 14, 15, 16, 17, 18, 19, 20, 21, 22, 23, 24, 25, 26, 27, 28, 29, 30, 31, 32, 33, 34, 35, 36, 37, 38, 39, 40, 41, 42, 43, 44, 45, 46, 47, 48, 49, or 50.

[0118] The recitation of a listing of chemical groups in any definition of a variable herein includes definitions of that variable as any single group or combination of listed groups. The recitation of an embodiment for a variable or aspect herein includes that embodiment as any single embodiment or in combination with any other embodiments or portions thereof.

[0119] All terms are intended to be understood as they would be understood by a person skilled in the art. Unless defined otherwise, all technical and scientific terms used herein have the same meaning as commonly understood by one of ordinary skill in the art to which the disclosure pertains.

[0120] In this application, the use of the singular includes the plural unless specifically stated otherwise. It must be noted that, as used in the specification, the singular forms “a,” “an” and “the” include plural referents unless the context clearly dictates otherwise. In this application, the use of “or” means “and/or” unless stated otherwise. Furthermore, use of the term “including” as well as other forms, such as “include”, “includes,” and “included,” is not limiting.

[0121] As used in this specification and claim(s), the words “comprising” (and any form of comprising, such as “comprise” and “comprises”), “having” (and any form of having, such as “have” and “has”), “including” (and any form of including, such as “includes” and “include”) or “containing” (and any form of containing, such as “contains” and “contain”) are inclusive or open-ended. This wording indicates that specified elements, features, components, and/or method steps are present, but does not exclude the presence of other elements, features, components, and/or method steps. Any embodiments specified as “comprising” a particular component(s) or element(s) are also contemplated as “consisting of” or “consisting essentially of” the particular component(s) or element(s) in some embodiments. It is contemplated that any embodiment discussed in this specification can be implemented with respect to any method or composition of the present disclosure, and vice versa. Furthermore, compositions of the present disclosure can be used to achieve methods of the present disclosure.

[0122] The term “about” or “approximately” means within an acceptable error range for the particular value as determined by one of ordinary skill in the art, which will depend in part on how the value is measured or determined, i.e., the limitations of the measurement system.

[0123] Reference in the specification to “some embodiments,” “an embodiment,” “one embodiment” or “other embodiments” means that a particular feature, structure, or characteristic described in connection with the embodiments is included in at least some embodiments, but not necessarily all embodiments, of the present disclosures.

### BRIEF DESCRIPTION OF THE DRAWINGS

[0124] FIG. 1 provides a bar graph showing maximum percent A to G base editing of a phenylalanine hydroxylase (PAH) polynucleotide in GM02406 cells using the indicated base editor systems. In FIG. 1, each base editor system is identified using the following terminology: the identifier preceding the first underscore (“_”) indicates the guide polynucleotide (e.g., g5847), the identifier following the first underscore indicates the MRNA molecule encoding the base editor polypeptide (e.g., MRNA4018), the term “PAH” indicates the target gene, and the identifier following the last underscore indicates the protospacer adjacent motif bound by the nucleic acid programmable DNA binding protein (napDNAbp) of the base editor polypeptide. In FIG. 1, the base editor system “sg23_MRNA4247_ALAS1,” which targets an ALAS1 polynucleotide for base editing, was used as a positive control for base editing. The cells were transfected with 1000 ng of mRNA encoding the base editor and 333 ng of the guide polynucleotide (i.e., gRNA). Base editing was measured using next-generation sequencing 72 hours following transfection. 6×10e4 cells were used in each transfection.

[0125] FIGS. 2A-2E provide schematic diagrams and bar graphs. FIG. 2A provides a schematic diagram showing the PAH target site (boxed region) for the guide polynucleotide g5847. FIG. 2B provides a schematic diagram showing the PAH target site (boxed region) for the guide polynucleotide g5849. FIG. 2C provides a schematic diagram showing the PAH target site (boxed region) for the guide polynucleotide g5851. FIG. 2D provides a schematic diagram showing the PAH target site (boxed region) for the guide polynucleotide g5855. In each of FIGS. 2A-2D, the target nucleobase is shown as a lowercase “a,” and the amino acid sequence encoded by each depicted PAH sequence is provided beneath the same. FIG. 2E provides a series of bar graphs showing percent on-target (“correct allele”; left bars) and nonsynonymous bystander editing (right bars) A to G editing measured in GM02406 cells administered the indicated base editors. The sequences shown in FIGS. 2A-2E, in order of occurrence correspond to SEQ ID NOs: 655, 657, and 656. The guide polynucleotides targeted a base editor to deaminate a nucleotide corresponding to an R408W pathogenic mutation. In FIG. 2E, each base editor system is identified using the following terminology: the identifier preceding the first underscore (“_”) indicates the guide polynucleotide (e.g., g5847), the identifier following the first underscore indicates the MRNA molecule encoding the base editor polypeptide (e.g., MRNA2743), the term “PAH” indicates the target gene, and the identifier following the last underscore indicates the protospacer adjacent motif bound by the nucleic acid programmable DNA binding protein (napDNAbp) of the base editor polypeptide.

[0126] FIG. 3 provides a bar graph showing maximum total percent A to G base editing (y-axis) of a phenylalanine hydroxylase (PAH) polynucleotide in GM02406 cells using the indicated base editor systems. In FIG. 3, each base editor system is identified using the following terminology: the guide polynucleotide relating to each cluster of bars is identified above the same; the identifier preceding the first underscore (“_”) indicates the MRNA molecule encoding the base editor polypeptide (e.g., MRNA4247), the term “ABE” indicates an adenosine deaminase, the term following the term “ABE_” indicates the identity of the adenosine deaminase domain of the base editor polypeptide (e.g., 8.20 refers to TadA*8.20), “SpCas9” indicates that the base editor polypeptide contained an SpCas9 napDNAbp, and the identifier following the last underscore indicates the protospacer adjacent motif bound by the nucleic acid programmable DNA binding protein (napDNAbp) of the base editor polypeptide. In FIG. 1, the base editor system “sg23_MRNA4247_ALAS1,” which targets an ALAS1 polynucleotide for base editing, was used as a positive control for base editing. The cells were transfected with 1000 ng of mRNA encoding the base editor and 333 ng of the guide polynucleotide (i.e., gRNA). Base editing was measured using next-generation sequencing 72 hours following transfection. 6×10e4 cells were used in each transfection.

[0127] FIG. 4 provides a series of bar graphs showing percent on-target (“correct allele”; left bars) and nonsynonymous bystander editing (right bars) A to G editing measured in GM02406 cells administered the indicated base editors. In FIG. 4, each base editor system is identified using the following terminology: the identifier preceding the first underscore (“_”) indicates the guide polynucleotide (e.g., g5851), the identifier following the first underscore indicates the MRNA molecule encoding the base editor polypeptide (e.g., MRNA3170), and the identifier following the last underscore indicates the protospacer adjacent motif bound by the nucleic acid programmable DNA binding protein (napDNAbp) of the base editor polypeptide.

[0128] FIG. 5 provides a bar graph showing percent A to G base editing measured in untreated control GM02406 cells. The cells were not transfected with any mRNA or guide RNA. These data were helpful to empirically establish the baseline, rather than use the assumed 50% that might be expected for these cells derived from a heterozygous patient.

[0129] FIG. 6 provides a plot showing an editing profile or an ABE8.20 base editor, where positions are indicated relative to the protospacer adjacent motif (PAM), where the nucleobase adjacent to the PAM is position 1. The “nom_weight” indicated for each position is proportional to the probability that the position will be edited by ABE8.20 (e.g., position 5 is the most likely to be edited). In FIG. 6 the terms 5A, 5C, 5G, etc. indicate the “nom_weight” for base editing of the indicated base at the indicated particular position.

[0130] FIG. 7 provides a series of bar graphs showing percent on-target (“correct allele”; left bars) and nonsynonymous bystander editing (right bars) A to G editing measured in GM02406 cells administered the indicated base editors. In FIG. 7, each base editor system is identified using the following terminology: the identifier preceding the first underscore (“_”) indicates the guide polynucleotide (e.g., g5851), the identifier following the first underscore indicates the MRNA molecule encoding the base editor polypeptide (e.g., MRNA3170), and the identifier following the last underscore indicates the protospacer adjacent motif bound by the nucleic acid programmable DNA binding protein (napDNAbp) of the base editor polypeptide. Beneath each plot of FIG. 7 is provided a sequence for the target site corresponding to the data of the plot, where the nucleotide targeted for base editing is underlined and the PAM sequence is shown in bold. The nucleotide sequences provided beneath each plot correspond to SEQ ID NOs: 658-661, in order of occurrence. In FIG. 7 the term “ABE_8.20_SpCas9_NG” indicates an adenosine deaminase base editor (ABE) containing a TadA*8.20 adenosine deaminase domain and an SpCas9 napDNAbp domain with specificity for an NG PAM sequence, “ABE_8.20-IBE16_SpCas9_NGC” indicates an adenosine deaminase base editor (ABE) containing a TadA*8.20 adenosine deaminase domain inserted within an SpCas9 napDNAbp domain with specificity for an NGC PAM sequence.

### DETAILED DESCRIPTION

[0131] Provided herein are base editors, endonucleases, and guide RNAs (gRNAs) for use in editing, modifying, or altering a target polynucleotide. In particular embodiments, a base editor or endonuclease of the present disclosure modifies an phenylalanine hydroxylase (PAH) polynucleotide. In particular embodiments, a base editor of the disclosure deaminates a pathogenic nucleobase in a PAH polynucleotide to increase or restore activity of the phenylalanine hydroxylase polypeptide encoded by the same.

[0132] The various aspects and embodiments of the disclosure are based, at least in part, upon the discovery that base editing (e.g., to alter or correct a pathogenic nucleotide) can be used to increase the expression or activity of a PAH polypeptide, where a deficiency in PAH is associated with phenylketonuria (PKU). In particular, increasing expression and/or activity of the PAH polypeptide in a subject diagnosed with or having a propensity to develop phenylketonuria can be an effective treatment strategy. This increase in expression and/or activity can be effected using any of the base editing systems provided herein. Accordingly, the disclosure features compositions and methods for editing a PAH polynucleotide. The edit to the PAH polynucleotide is associated with an increase or restoration of expression or activity of a PAH polypeptide in a cell of a subject, as well as a decrease in Phe in the blood of the subject and/or a decrease in symptoms associated with PKU.

[0133] In embodiments, the methods of the present disclosure include altering a PAH polynucleotide to restore or increase activity of a PAH polypeptide encoded thereby. For example, the base editors or base editor systems provided herein can be used for editing a nucleobase in an exon of the PAH polynucleotide. In some embodiments, the target sequence is or contains codon 408 of the PAH polynucleotide. In some embodiments, the deamination of an A or C nucleobase in the exon results in a restoration or increase of activity of a PAH polypeptide. In some embodiments, the subject has or has the potential to develop phenylketonuria.

[0134] In some instances, the methods of the present disclosure include modifying a PAH polynucleotide to increase levels or activity of the PAH polynucleotide and/or polypeptide. The alterations can be effected by a base editor system, such as those described herein.

[0135] In some embodiments, the present disclosure provides base editor systems that efficiently generate an intended mutation, such as an alteration of a nucleotide, in a nucleic acid molecule (e.g., a nucleic acid within a genome of a subject) without generating a significant number of unintended mutations, such as unintended point mutations. In some embodiments, an intended mutation is a mutation that is generated by a specific base editor (e.g., an adenosine base editor or a cytidine base editor) bound to a guide polynucleotide (e.g., gRNA) specifically designed to generate the intended mutation. In some embodiments, the intended mutation is an adenine (A) to guanine (G) point mutation within the coding region of a gene. In some embodiments, the intended mutation is a cytosine (C) to thymine (T) point mutation within the coding region of a gene. In some embodiments, the intended mutation is a mutation of a nucleobase corresponding to codon 408 of a PAH polynucleotide, where in some embodiments codon 408 encodes a tryptophan (W) amino acid prior to base editing. In some instances, the intended mutation results in a W408R amino acid alteration in the PAH polypeptide encoded by the PAH polynucleotide. In some embodiments, the intended mutation is an adenine (A) to guanine (G) point mutation in codon 408 of the PAH polynucleotide. In some embodiments, the intended mutation is a missense mutation.

[0136] In some embodiments, any of the base editors provided herein are capable of generating a ratio of intended mutations to unintended mutations (e.g., intended point mutations:unintended point mutations) that is greater than 1:1. In some embodiments, any of the base editors provided herein are capable of generating a ratio of intended mutations to unintended mutations (e.g., intended point mutations:unintended point mutations) that is at least 1.5:1, at least 2:1, at least 2.5:1, at least 3:1, at least 3.5:1, at least 4:1, at least 4.5:1, at least 5:1, at least 5.5:1, at least 6:1, at least 6.5:1, at least 7:1, at least 7.5:1, at least 8:1, at least 10:1, at least 12:1, at least 15:1, at least 20:1, at least 25:1, at least 30:1, at least 40:1, at least 50:1, at least 100:1, at least 150:1, at least 200:1, at least 250:1, at least 500:1, or at least 1000:1, or more.

[0137] In some embodiments, editing of a plurality of nucleobase pairs in one or more genes using the methods provided herein results in formation of at least one intended mutation. In some embodiments, the formation of the at least one intended mutation is in the exon of a disease-associated gene and results in a restoration or increase in activity of a polypeptide encoded by the disease-associated gene. It should be appreciated that multiplex editing can be accomplished using any method or combination of methods provided herein.

[0138] The present disclosure provides methods for the treatment of a subject diagnosed with a phenylketonuria (PKU). For example, in some embodiments, a method is provided that comprises administering to a subject having or having a propensity to develop PKU, an effective amount of a nucleobase editor (e.g., an adenosine deaminase base editor or a cytidine deaminase base editor) to effect an alteration in a PKU polynucleotide sequence, thereby reducing levels of Phe in a biological sample of the subject.

### Phenylketonuria

[0139] Phenylketonuria is associated with mutations in the gene encoding PAH. In embodiments, a mutation in the PAH gene encodes a pathogenic R408W amino acid alteration to the PAH polypeptide. Phenylketonuria (commonly known as PKU) is an inherited disorder that increases the levels of a substance called phenylalanine in the blood. Phenylalanine is a protein building block (an amino acid) that is obtained from eating certain foods (such as meat, eggs, nuts, and milk) and in some artificial sweeteners. If PKU is not treated, phenylalanine can build up to harmful levels in the body, causing intellectual disability and other serious health problems.

[0140] The signs and symptoms of PKU vary from mild to severe. The most severe form of this disorder is known as classic PKU. Infants with classic PKU appear normal until they are a few months old. Without treatment, these children develop permanent intellectual disability. Seizures, delayed development, behavioral problems, and psychiatric disorders are also common. Untreated individuals may have a musty or mouse-like odor as a side effect of excess phenylalanine in the body. Children with classic PKU tend to have lighter skin and hair than unaffected family members and are also likely to have skin disorders such as eczema.

[0141] Less severe forms of this condition, sometimes called variant PKU and non-PKU hyperphenylalaninemia, have a smaller risk of brain damage. People with very mild cases may not require treatment.

[0142] PKU can often be managed by following a diet that is low in phenylalanine. Since phenylalanine is found in all proteins, the PKU diet consists of avoiding meat, dairy, nuts, tofu, and other foods that are high in protein. Infants with PKU need to be fed with a low-protein formula. Affected individuals are often limited to certain fruits and vegetables and foods containing fats and sugars (such as butter, jelly, pasta, and potato chips). The artificial sweeter aspartame, which is found in diet soda and many other low-calorie items, should be avoided as it contains high amounts of phenylalanine. The amount of phenylalanine that is safe to consume is different for each person. Affected individuals should work with a health care professional to develop an individualized diet.

[0143] Babies born to mothers who have PKU and are not following a low-phenylalanine diet have a significant risk of intellectual disability because they are exposed to very high levels of phenylalanine before birth. These infants may also have a low birth weight and grow more slowly than other children. They may also have heart defects or other heart problems, an abnormally small head size (microcephaly), and behavioral problems. Women with PKU who are not following a low-phenylalanine diet (and may have high levels of phenylalanine) also have higher risk of pregnancy loss.

[0144] Variants (also called mutations) in the PAH gene cause phenylketonuria (e.g., a mutation causing an R408W amino acid alteration in the PAH polypeptide encoded by the gene). The PAH gene provides instructions for making an enzyme called phenylalanine hydroxylase. This enzyme converts the amino acid phenylalanine into other important compounds in the body. PAH gene variants result in the production of altered versions of phenylalanine hydroxylase that cannot process phenylalanine effectively. As a result, this amino acid can build up to toxic levels in the blood and other tissues. Because nerve cells in the brain are particularly sensitive to phenylalanine levels, excessive amounts of this substance can cause brain damage.

[0145] Classic PKU, the most severe form of the disorder, occurs in people who have very low levels of phenylalanine hydroxylase activity or who have no phenylalanine hydroxylase activity at all. People with untreated classic PKU have levels of phenylalanine high enough to cause severe brain damage and other serious health problems. Variants in the PAH gene that allow the enzyme to retain some activity result in milder versions of this condition, such as variant PKU or non-PKU hyperphenylalaninemia.

[0146] Changes in other genes may influence the severity of PKU, but little is known about these additional genetic factors.

[0147] Accordingly, the present disclosure provides compositions and methods for use in the treatment of PKU in a subject. In embodiments, the methods of the disclosure are associated with a reduction in levels of phenylalanine (Phe) in a subject (e.g., in the blood of the subject). In some cases, the reduction is a 5%, 10%, 15%, 20%, 25%, 30%, 35%, 40%, 45%, 50%, 55%, 60%, 65%, 70%, 75%, 80%, 85%, 90%, or 95% reduction. In some embodiments, the reduction in Phe levels results in a Phe concentration in the blood of the subject that is below 100 μmol/L, 110 μmol/L, 120 μmol/L, 130 μmol/L, 140 μmol/L, 150 μmol/L, 160 μmol/L, 170 mol/L, 180 μmol/L, 190 μmol/L, 200 μmol/L, 250 μmol/L, 300 μmol/L, 350 μmol/L, 360 μmol/L, 400 μmol/L, 500 μmol/L, 1000 μmol/L, 1200 μmol/L, or 1500 μmol/L. In embodiments, treatment with a base editor described herein reduces the level of Phe in a biological sample of the subject to about 2-6 mg/dl (120-360 μmol/L). Methods for measuring Phe levels and/or diagnosing PKU are known in the art and described, for example, by Stone et al., “Phenylketonuria,” Treasure Island (FL): StatPearls Publishing; 2023 January; Regier et al., Phenylalanine Hydroxylase Deficiency, GeneReviews, https://www.ncbi.nlm.nih.gov/books/NBK1504/; and Vinueza, Recent Advances in Phenylketonuria: A Review, Cureus. 2023 June; 15 (6): e40459.

### Editing of Target Genes

[0148] To produce the gene edits described herein, cells (e.g., hepatocytes) are contacted with one or more guide RNAs and a nucleobase editor polypeptide (e.g., by transfecting the cells with an mRNA encoding a nucleobase editor polypeptide) comprising a nucleic acid programmable DNA binding protein (napDNAbp) and a cytidine deaminase or adenosine deaminase or comprising one or more deaminases with cytidine deaminase and/or adenosine deaminase activity (e.g., a “dual deaminase” which has cytidine and adenosine deaminase activity). In some embodiments, cells to be edited are contacted with at least one nucleic acid, wherein the at least one nucleic acid encodes one or more guide RNAs and a nucleobase editor polypeptide comprising a nucleic acid programmable DNA binding protein (napDNAbp) and a cytidine deaminase. In some embodiments, the gRNA comprises nucleotide analogs. In some instances, the gRNA is added directly to a cell. These nucleotide analogs can inhibit degradation of the gRNA from cellular processes.

[0149] Variants of the spacer sequences listed in Table 1 comprising 1, 2, 3, 4, or 5 nucleobase alterations are contemplated. For example, variation of a target polynucleotide sequence within a population (e.g., single nucleotide polymorphisms) may require said alterations to a spacer sequence to allow the spacer to better bind a variant of a target sequence in a subject.

[0150] In various instances, it is advantageous for a spacer sequence to include a 5′ and/or a 3′ “G” nucleotide. In some cases, for example, any spacer sequence or guide polynucleotide provided herein comprises or further comprises a 5′ “G”, where, in some embodiments, the 5′“G” is or is not complementary to a target sequence. In some embodiments, the 5′ “G” is added to a spacer sequence that does not already contain a 5′ “G.” For example, it can be advantageous for a guide RNA to include a 5′ terminal “G” when the guide RNA is expressed under the control of a U6 promoter or the like because the U6 promoter prefers a “G” at the transcription start site (see Cong, L. et al. “Multiplex genome engineering using CRISPR/Cas systems. Science 339:819-823 (2013) doi: 10.1126/science. 1231143). In some cases, a 5′ terminal “G” is added to a guide polynucleotide that is to be expressed under the control of a promoter but is optionally not added to the guide polynucleotide if or when the guide polynucleotide is not expressed under the control of a promoter.

[0151] Exemplary guide polynucleotide sequences are provided in the following Table 1 and exemplary base editor sequences are provided in the following Table 2.

TABLE 1
Exemplary guide polynucleotide sequences.¹

| | | SEQ | | SEQ |
|---|---|---|---|---|
| guide | | ID | | ID |
| RNA | Spacer Sequence | NO | Guide Sequence | NO |
| gRNA5847 | AAGGGCCAAGGUAUUG | 426 | mAsmAsmGsGGCCAAGGUAUUGUGGCGUU | 435 |
| | UGGC | | UUAGAGCUAGAAAUAGCAAGUUAAAAUAA | |
| | | | GGCUAGUCCGUUAUCAACUUGAAAAAGUG | |
| | | | GCACCGAGUCGGUGCmUsmUsmUsU | |
| gRNA5848 | AGGGCCAAGGUAUUGU | 427 | mAsmGsmGsGCCAAGGUAUUGUGGCAGGU | 436 |
| | GGCAG | | UUUAGUACUCUGUAAUGAAAAUUACAGAA | |
| | | | UCUACUAAAACAAGGCAAAAUGCCGUGUU | |
| | | | UAUCUCGUCAACUUGUUGGCGAGAUsmUs | |
| | | | mUsmU | |
| gRNA5849 | CCAAGGUAUUGUGGCA | 428 | mCsmCsmAsAGGUAUUGUGGCAGCAAGUU | 437 |
| | GCAA | | UUAGAGCUAGAAAUAGCAAGUUAAAAUAA | |
| | | | GGCUAGUCCGUUAUCAACUUGAAAAAGUG | |
| | | | GCACCGAGUCGGUGCmUsmUsmUsU | |
| gRNA5850 | GAAGGGCCAAGGUAUU | 429 | mGsmAsmAsGGGCCAAGGUAUUGUGGGUU | 438 |
| | GUGG | | UUAGAGCUAGAAAUAGCAAGUUAAAAUAA | |
| | | | GGCUAGUCCGUUAUCAACUUGAAAAAGUG | |
| | | | GCACCGAGUCGGUGCmUsmUsmUsU | |
| gRNA5851 | GAGAAGGGCCAAGGUA | 430 | mGsmAsmGsAAGGGCCAAGGUAUUGUGUU | 439 |
| | UUGU | | UUAGAGCUAGAAAUAGCAAGUUAAAAUAA | |
| | | | GGCUAGUCCGUUAUCAACUUGAAAAAGUG | |
| | | | GCACCGAGUCGGUGCmUsmUsmUsU | |
| gRNA5852 | GCCAAGGUAUUGUGGC | 431 | mGsmCsmCsAAGGUAUUGUGGCAGCAGUU | 440 |
| | AGCA | | UUAGAGCUAGAAAUAGCAAGUUAAAAUAA | |
| | | | GGCUAGUCCGUUAUCAACUUGAAAAAGUG | |
| | | | GCACCGAGUCGGUGCmUsmUsmUsU | |
| gRNA5853 | GGCCAAGGUAUUGUGG | 432 | mGsmGsmCsCAAGGUAUUGUGGCAGCGUU | 441 |
| | CAGC | | UUAGAGCUAGAAAUAGCAAGUUAAAAUAA | |
| | | | GGCUAGUCCGUUAUCAACUUGAAAAAGUG | |
| | | | GCACCGAGUCGGUGCmUsmUsmUsU | |
| gRNA5854 | GGGCCAAGGUAUUGUG | 433 | mGsmGsmGsCCAAGGUAUUGUGGCAGGUU | 442 |
| | GCAG | | UUAGAGCUAGAAAUAGCAAGUUAAAAUAA | |
| | | | GGCUAGUCCGUUAUCAACUUGAAAAAGUG | |
| | | | GCACCGAGUCGGUGCmUsmUsmUsU | |
| gRNA5855 | UGAGAAGGGCCAAGGU | 434 | mUsmGsmAsGAAGGGCCAAGGUAUUGGUU | 443 |
| | AUUG | | UUAGAGCUAGAAAUAGCAAGUUAAAAUAA | |
| | | | GGCUAGUCCGUUAUCAACUUGAAAAAGUG | |
| | | | GCACCGAGUCGGUGCmUsmUsmUsU | |

¹ “mN” indicates a 2′-OMe modification of the nucleotide “N”, and “Ns” indicates that the nucleotide “N” is linked to the following (i.e., 3′) nucleotide by a phosphorothioate (PS).

TABLE 2
Exemplary base editor amino acid sequences.

| | | | SEQ |
|---|---|---|---|
| MRNA | | | ID |
| Name | Editor | Base editor amino acid sequence | NO |
| MRNA4018 | ABE TadA- | MSEVEFSHEYWMRHALTLAKRARDEREVPVGAVLVLNNRVIGEGWNRA | 444 |
| | 8.20_SpCas9_ | IGLHDPTAHAEIMALRQGGLVMQNYRLYDATLYSTFEPCVMCAGAMIH | |
| | NRCH | SRIGRVVFGVRNAKTGAAGSLMDVLHHPGMNHRVEITEGILADECAAL | |
| | | LCRFFRMPRRVFNAQKKAQSSTDSGGSSGGSSGSETPGTSESATPESS | |
| | | GGSSGGSDKKYSIGLAIGTNSVGWAVITDEYKVPSKKFKVLGNTDRHS | |
| | | IKKNLIGALLFDSGETAEATRLKRTARRRYTRRKNRICYLQEIFSNEM | |
| | | AKVDDSFFHRLEESFLVEEDKKHERHPIFGNIVDEVAYHEKYPTIYHL | |
| | | RKKLVDSTDKADLRLIYLALAHMIKFRGHFLIEGDLNPDNSDVDKLFI | |
| | | QLVQTYNQLFEENPINASGVDAKAILSARLSKSRRLENLIAQLPGEKK | |
| | | NGLFGNLIALSLGLTPNFKSNFDLAEDAKLQLSKDTYDDDLDNLLAQI | |
| | | GDQYADLFLAAKNLSDAILLSDILRVNTEITKAPLSASMVKRYDEHHQ | |
| | | DLTLLKALVRQQLPEKYKEIFFDQSKNGYAGYIDGGASQEEFYKFIKP | |
| | | ILEKMDGTEELLVKLNREDLLRKQRTFDNGIIPHQIHLGELHAILRRQ | |
| | | GDFYPFLKDNREKIEKILTFRIPYYVGPLARGNSRFAWMTRKSEETIT | |
| | | PWNFEEVVDKGASAQSFIERMTNFDKNLPNEKVLPKHSLLYEYFTVYN | |
| | | ELTKVKYVTEGMRKPAFLSGEQKKAIVDLLFKTNRKVTVKQLKEDYFK | |
| | | KIECFDSVEISGVEDRFNASLGTYHDLLKIIKDKDFLDNEENEDILED | |
| | | IVLTLTLFEDREMIEERLKTYAHLFDDKVMKQLKRLRYTGWGRLSRKL | |
| | | INGIRDKQSGKTILDFLKSDGFANRNFMQLIHDDSLTFKEDIQKAQVS | |
| | | GQGDSLHEHIANLAGSPAIKKGILQTVKVVDELVKVMGGHKPENIVIE | |
| | | MARENQTTQKGQKNSRERMKRIEEGIKELGSQILKEHPVENTQLQNEK | |
| | | LYLYYLQNGRDMYVDQELDINRLSDYDVDHIVPQSFLKDDSIDNKVLT | |
| | | RSDKNRGKSDNVPSEEVVKKMKNYWRQLLNAKLITQRKFDNLTKAERG | |
| | | GLSELDKAGFIKRQLVETRQITKHVAQILDSRMNTKYDENDKLIREVK | |
| | | VITLKSKLVSDFRKDFQFYKVREINNYHHAHDAYLNAVVGTALIKKYP | |
| | | KLESEFVYGDYKVYDVRKMIAKSEQEIGKATAKYFFYSNIMNFFKTEI | |
| | | TLANGEIRKRPLIETNGETGEIVWDKGRDFATVRKVLSMPQVNIVKKT | |
| | | EVQTGGFSKESILPKGNSDKLIARKKDWDPKKYGGFNSPTVAYSVLVV | |
| | | AKVEKGKSKKLKSVKELLGITIMERSSFEKNPIDFLEAKGYKEVKKDL | |
| | | IIKLPKYSLFELENGRKRMLASAGVLQKGNELALPSKYVNFLYLASHY | |
| | | EKLKGSPEDNEQKQLFVEQHKHYLDEIIEQISEFSKRVILADANLDKV | |
| | | LSAYNKHRDKPIREQAENIIHLFTLTNLGAPAAFKYFDTTINRKQYNT | |
| | | TKEVLDATLIRQSITGLYETRIDLSQLGGDEGADKRTADGSEFESPKK | |
| | | KRKV | |
| MRNA3756 | ABE_TadA- | MKRTADGSEFESPKKKRKVSEVEFSHEYWMRHALTLAKRARDEREVPV | 445 |
| | 8.20_SpCas9_ | GAVLVLNNRVIGEGWNRAIGLHDPTAHAEIMALRQGGLVMQNYRLYDA | |
| | NG | TLYSTFEPCVMCAGAMIHSRIGRVVFGVRNAKTGAAGSLMDVLHHPGM | |
| | | NHRVEITEGILADECAALLCRFFRMPRRVFNAQKKAQSSTDSGGSSGG | |
| | | SSGSETPGTSESATPESSGGSSGGSDKKYSIGLAIGTNSVGWAVITDE | |
| | | YKVPSKKFKVLGNTDRHSIKKNLIGALLFDSGETAEATRLKRTARRRY | |
| | | TRRKNRICYLQEIFSNEMAKVDDSFFHRLEESFLVEEDKKHERHPIFG | |
| | | NIVDEVAYHEKYPTIYHLRKKLVDSTDKADLRLIYLALAHMIKFRGHF | |
| | | LIEGDLNPDNSDVDKLFIQLVQTYNQLFEENPINASGVDAKAILSARL | |
| | | SKSRRLENLIAQLPGEKKNGLFGNLIALSLGLTPNFKSNFDLAEDAKL | |
| | | QLSKDTYDDDLDNLLAQIGDQYADLFLAAKNLSDAILLSDILRVNTEI | |
| | | TKAPLSASMIKRYDEHHQDLTLLKALVRQQLPEKYKEIFFDQSKNGYA | |
| | | GYIDGGASQEEFYKFIKPILEKMDGTEELLVKLNREDLLRKQRTFDNG | |
| | | SIPHQIHLGELHAILRRQEDFYPFLKDNREKIEKILTFRIPYYVGPLA | |
| | | RGNSRFAWMTRKSEETITPWNFEEVVDKGASAQSFIERMTNFDKNLPN | |
| | | EKVLPKHSLLYEYFTVYNELTKVKYVTEGMRKPAFLSGEQKKAIVDLL | |
| | | FKTNRKVTVKQLKEDYFKKIECFDSVEISGVEDRFNASLGTYHDLLKI | |
| | | IKDKDFLDNEENEDILEDIVLTLTLFEDREMIEERLKTYAHLFDDKVM | |
| | | KQLKRRRYTGWGRLSRKLINGIRDKQSGKTILDFLKSDGFANRNFMQL | |
| | | IHDDSLTFKEDIQKAQVSGQGDSLHEHIANLAGSPAIKKGILQTVKVV | |
| | | DELVKVMGRHKPENIVIEMARENQTTQKGQKNSRERMKRIEEGIKELG | |
| | | SQILKEHPVENTQLQNEKLYLYYLQNGRDMYVDQELDINRLSDYDVDH | |
| | | IVPQSFLKDDSIDNKVLTRSDKNRGKSDNVPSEEVVKKMKNYWRQLLN | |
| | | AKLITQRKFDNLTKAERGGLSELDKAGFIKRQLVETRQITKHVAQILD | |
| | | SRMNTKYDENDKLIREVKVITLKSKLVSDFRKDFQFYKVREINNYHHA | |
| | | HDAYLNAVVGTALIKKYPKLESEFVYGDYKVYDVRKMIAKSEQEIGKA | |
| | | TAKYFFYSNIMNFFKTEITLANGEIRKRPLIETNGETGEIVWDKGRDF | |
| | | ATVRKVLSMPQVNIVKKTEVQTGGFSKESIRPKRNSDKLIARKKDWDP | |
| | | KKYGGFVSPTVAYSVLVVAKVEKGKSKKLKSVKELLGITIMERSSFEK | |
| | | NPIDFLEAKGYKEVKKDLIIKLPKYSLFELENGRKRMLASARFLQKGN | |
| | | ELALPSKYVNFLYLASHYEKLKGSPEDNEQKQLFVEQHKHYLDEIIEQ | |
| | | ISEFSKRVILADANLDKVLSAYNKHRDKPIREQAENIIHLFTLTNLGA | |
| | | PRAFKYFDTTIDRKVYRSTKEVLDATLIHQSITGLYETRIDLSQLGGD | |
| | | EGADKRTADGSEFESPKKKRKV | |
| MRNA3554 | ABE_8.20_ | MKRTADGSEFESPKKKRKVSEVEFSHEYWMRHALTLAKRARDEREVPV | 446 |
| | SpCas9_ | GAVLVLNNRVIGEGWNRAIGLHDPTAHAEIMALRQGGLVMQNYRLYDA | |
| | NRTH | TLYSTFEPCVMCAGAMIHSRIGRVVFGVRNAKTGAAGSLMDVLHHPGM | |
| | | NHRVEITEGILADECAALLCRFFRMPRRVFNAQKKAQSSTDSGGSSGG | |
| | | SSGSETPGTSESATPESSGGSSGGSDKKYSIGLAIGTNSVGWAVITDE | |
| | | YKVPSKKFKVLGNTDRHSIKKNLIGALLFDSGETAEATRLKRTARRRY | |
| | | TRRKNRICYLQEIFSNEMAKVDDSFFHRLEESFLVEEDKKHERHPIFG | |
| | | NIVDEVAYHEKYPTIYHLRKKLVDSTDKADLRLIYLALAHMIKFRGHF | |
| | | LIEGDLNPDNSDVDKLFIQLVQTYNQLFEENPINASGVDAKAILSARL | |
| | | SKSRRLENLIAQLPGEKKNGLFGNLIALSLGLTPNFKSNFDLAEDAKL | |
| | | QLSKDTYDDDLDNLLAQIGDQYADLFLAAKNLSDAILLSDILRVNTEI | |
| | | TKAPLSASMVKRYDEHHQDLTLLKALVRQQLPEKYKEIFFDQSKNGYA | |
| | | GYIDGGASQEEFYKFIKPILEKMDGTEELLVKLNREDLLRKQRTFDNG | |
| | | IIPHQIHLGELHAILRRQGDFYPFLKDNREKIEKILTFRIPYYVGPLA | |
| | | RGNSRFAWMTRKSEETITPWNFEEVVDKGASAQSFIERMTNFDKNLPN | |
| | | EKVLPKHSLLYEYFTVYNELTKVKYVTEGMRKPAFLSGEQKKAIVDLL | |
| | | FKTNRKVTVKQLKEDYFKKIECFDSVEISGVEDRFNASLGTYHDLLKI | |
| | | IKDKDFLDNEENEDILEDIVLTLTLFEDREMIEERLKTYAHLFDDKVM | |
| | | KQLKRLRYTGWGRLSRKLINGIRDKQSGKTILDFLKSDGFANRNFMQL | |
| | | IHDDSLTFKEDIQKAQVSGQGDSLHEHIANLAGSPAIKKGILQTVKVV | |
| | | DELVKVMGGHKPENIVIEMARENQTTQKGQKNSRERMKRIEEGIKELG | |
| | | SQILKEHPVENTQLQNEKLYLYYLQNGRDMYVDQELDINRLSDYDVDH | |
| | | IVPQSFLKDDSIDNKVLTRSDKNRGKSDNVPSEEVVKKMKNYWRQLLN | |
| | | AKLITQRKFDNLTKAERGGLSELDKAGFIKRQLVETRQITKHVAQILD | |
| | | SRMNTKYDENDKLIREVKVITLKSKLVSDFRKDFQFYKVREINNYHHA | |
| | | HDAYLNAVVGTALIKKYPKLESEFVYGDYKVYDVRKMIAKSEQEIGKA | |
| | | TAKYFFYSNIMNFFKTEITLANGEIRKRPLIETNGETGEIVWDKGRDF | |
| | | ATVRKVLSMPQVNIVKKTEVQTGGFSKESILPKGNSDKLIARKKDWDP | |
| | | KKYGGFNSPTVAYSVLVVAKVEKGKSKKLKSVKELLGITIMERSSFEK | |
| | | NPIGFLEAKGYKEVKKDLIIKLPKYSLFELENGRKRMLASASVLHKGN | |
| | | ELALPSKYVNFLYLASHYEKLKGSSEDNKQKQLFVEQHKHYLDEIIEQ | |
| | | ISEFSKRVILADANLDKVLSAYNKHRDKPIREQAENIIHLFTLTNLGA | |
| | | SAAFKYFDTTIGRKLYTSTKEVLDATLIHQSITGLYETRIDLSQLGGD | |
| | | EGADKRTADGSEFESPKKKRKV | |
| MRNA2743 | ABE_8.20_ | MKRTADGSEFESPKKKRKVSEVEFSHEYWMRHALTLAKRARDEREVPV | 447 |
| | SpCas9_ | GAVLVLNNRVIGEGWNRAIGLHDPTAHAEIMALRQGGLVMQNYRLYDA | |
| | NGC | TLYSTFEPCVMCAGAMIHSRIGRVVFGVRNAKTGAAGSLMDVLHHPGM | |
| | | NHRVEITEGILADECAALLCRFFRMPRRVFNAQKKAQSSTDSGGSSGG | |
| | | SSGSETPGTSESATPESSGGSSGGSDKKYSIGLAIGTNSVGWAVITDE | |
| | | YKVPSKKFKVLGNTDRHSIKKNLIGALLFDSGETAEATRLKRTARRRY | |
| | | TRRKNRICYLQEIFSNEMAKVDDSFFHRLEESFLVEEDKKHERHPIFG | |
| | | NIVDEVAYHEKYPTIYHLRKKLVDSTDKADLRLIYLALAHMIKFRGHF | |
| | | LIEGDLNPDNSDVDKLFIQLVQTYNQLFEENPINASGVDAKAILSARL | |
| | | SKSRRLENLIAQLPGEKKNGLFGNLIALSLGLTPNFKSNFDLAEDAKL | |
| | | QLSKDTYDDDLDNLLAQIGDQYADLFLAAKNLSDAILLSDILRVNTEI | |
| | | TKAPLSASMVKRYDEHHQDLTLLKALVRQQLPEKYKEIFFDQSKNGYA | |
| | | GYIDGGASQEEFYKFIKPILEKMDGTEELLVKLNREDLLRKQRTFDNG | |
| | | IIPHQIHLGELHAILRRQGDFYPFLKDNREKIEKILTFRIPYYVGPLA | |
| | | RGNSRFAWMTRKSEETITPWNFEEVVDKGASAQSFIERMTNFDKNLPN | |
| | | EKVLPKHSLLYEYFTVYNELTKVKYVTEGMRKPAFLSGEQKKAIVDLL | |
| | | FKTNRKVTVKQLKEDYFKKIECFDSVEISGVEDRFNASLGTYHDLLKI | |
| | | IKDKDFLDNEENEDILEDIVLTLTLFEDREMIEERLKTYAHLFDDKVM | |
| | | KQLKRLRYTGWGRLSRKLINGIRDKQSGKTILDFLKSDGFANRNFMQL | |
| | | IHDDSLTFKEDIQKAQVSGQGDSLHEHIANLAGSPAIKKGILQTVKVV | |
| | | DELVKVMGGHKPENIVIEMARENQTTQKGQKNSRERMKRIEEGIKELG | |
| | | SQILKEHPVENTQLQNEKLYLYYLQNGRDMYVDQELDINRLSDYDVDH | |
| | | IVPQSFLKDDSIDNKVLTRSDKNRGKSDNVPSEEVVKKMKNYWRQLLN | |
| | | AKLITQRKFDNLTKAERGGLSELDKAGFIKRQLVETRQITKHVAQILD | |
| | | SRMNTKYDENDKLIREVKVITLKSKLVSDFRKDFQFYKVREINNYHHA | |
| | | HDAYLNAVVGTALIKKYPKLESEFVYGDYKVYDVRKMIAKSEQEIGKA | |
| | | TAKYFFYSNIMNFFKTEITLANGEIRKRPLIETNGETGEIVWDKGRDF | |
| | | ATVRKVLSMPQVNIVKKTEVQTGGFSKESILPKGNSDKLIARKKDWDP | |
| | | KKYGGFMQPTVAYSVLVVAKVEKGKSKKLKSVKELLGITIMERSSFEK | |
| | | NPIDFLEAKGYKEVKKDLIIKLPKYSLFELENGRKRMLASAKFLQKGN | |
| | | ELALPSKYVNFLYLASHYEKLKGSPEDNEQKQLFVEQHKHYLDEIIEQ | |
| | | ISEFSKRVILADANLDKVLSAYNKHRDKPIREQAENIIHLFTLINLGA | |
| | | PRAFKYFDTTIARKEYRSTKEVLDATLIHQSITGLYETRIDLSQLGGD | |
| | | EGADKRTADGSEFESPKKKRKV | |
| MRNA3167 | ABE_8.20_ | MKRTADGSEFESPKKKRKVDKKYSIGLAIGTNSVGWAVITDEYKVPSK | 448 |
| | IBE16_ | KFKVLGNTDRHSIKKNLIGALLFDSGETAEATRLKRTARRRYTRRKNR | |
| | SpCas9_ | ICYLQEIFSNEMAKVDDSFFHRLEESFLVEEDKKHERHPIFGNIVDEV | |
| | NGC | AYHEKYPTIYHLRKKLVDSTDKADLRLIYLALAHMIKFRGHFLIEGDL | |
| | | NPDNSDVDKLFIQLVQTYNQLFEENPINASGVDAKAILSARLSKSRRL | |
| | | ENLIAQLPGEKKNGLFGNLIALSLGLTPNFKSNFDLAEDAKLQLSKDT | |
| | | YDDDLDNLLAQIGDQYADLFLAAKNLSDAILLSDILRVNTEITKAPLS | |
| | | ASMVKRYDEHHQDLTLLKALVRQQLPEKYKEIFFDQSKNGYAGYIDGG | |
| | | ASQEEFYKFIKPILEKMDGTEELLVKLNREDLLRKQRTFDNGIIPHQI | |
| | | HLGELHAILRRQGDFYPFLKDNREKIEKILTFRIPYYVGPLARGNSRF | |
| | | AWMTRKSEETITPWNFEEVVDKGASAQSFIERMTNFDKNLPNEKVLPK | |
| | | HSLLYEYFTVYNELTKVKYVTEGMRKPAFLSGEQKKAIVDLLFKTNRK | |
| | | VTVKQLKEDYFKKIECFDSVEISGVEDRFNASLGTYHDLLKIIKDKDF | |
| | | LDNEENEDILEDIVLTLTLFEDREMIEERLKTYAHLFDDKVMKQLKRL | |
| | | RYTGWGRLSRKLINGIRDKQSGKTILDFLKSDGFANRNFMQLIHDDSL | |
| | | TFKEDIQKAQVSGQGDSLHEHIANLAGSPAIKKGILQTVKVVDELVKV | |
| | | MGGHKPENIVIEMARENQTTQKGQKNSRERMKRIEEGIKELGSQILKE | |
| | | HPVENTQLQNEKLYLYYLQNGRDMYVDQELDINRLSDYDVDHIVPQSF | |
| | | LKDDSIDNKVLTRSDKNRGKSDNVPSEEVVKKMKNYWRQLLNAKLITQ | |
| | | RKFDNLTKAERGGLSELDKAGFIKRQLVETRQITKHVAQILDSRMNTK | |
| | | YDENDKLIREVKVITLKSKLVSDFRKDFQFYKVREINNYHHAHDAYLN | |
| | | AVVGTALIKKYPKLESEFVYGDYKVYDVRKMIAKSEQEIGKATAKYFF | |
| | | YSNIMNFFKTEITLANGEIRKRPLIETNGETGEIVWDKGRDFATVRKV | |
| | | LSMPQVNIVKKTEVQTGGFSKESILPKGNSDKLIARKKDWDPKKYGGF | |
| | | MQPTVAYSVLVVAKVEKGKSKKLKSVKELLGITIMERSSFEKNPIDFL | |
| | | EAKGYKEVKKDLIIKLPKYSLFELENGRKRMLASAKFLQKGNELALPS | |
| | | KYVNFLYLASHYEKLKGGSSGSETPGTSESATPESSGSEVEFSHEYWM | |
| | | RHALTLAKRARDEREVPVGAVLVLNNRVIGEGWNRAIGLHDPTAHAEI | |
| | | MALRQGGLVMQNYRLYDATLYSTFEPCVMCAGAMIHSRIGRVVFGVRN | |
| | | AKTGAAGSLMDVLHHPGMNHRVEITEGILADECAALLCRFFRMPRRVF | |
| | | NAQKKAQSSTDSPEDNEQKQLFVEQHKHYLDEIIEQISEFSKRVILAD | |
| | | ANLDKVLSAYNKHRDKPIREQAENIIHLFTLTNLGAPRAFKYFDTTIA | |
| | | RKEYRSTKEVLDATLIHQSITGLYETRIDLSQLGGDEGADKRTADGSE | |
| | | FESPKKKRKV | |
| MRNA2892 | ABE_8.20_ | MSEVEFSHEYWMRHALTLAKRARDEREVPVGAVLVLNNRVIGEGWNRA | 449 |
| | SaCas9_ | IGLHDPTAHAEIMALRQGGLVMQNYRLYDATLYSTFEPCVMCAGAMIH | |
| | NNNRRT | SRIGRVVFGVRNAKTGAAGSLMDVLHHPGMNHRVEITEGILADECAAL | |
| | | LCRFFRMPRRVFNAQKKAQSSTDSGGSSGGSSGSETPGTSESATPESS | |
| | | GGSSGGSKRNYILGLAIGITSVGYGIIDYETRDVIDAGVRLFKEANVE | |
| | | NNEGRRSKRGARRLKRRRRHRIQRVKKLLFDYNLLTDHSELSGINPYE | |
| | | ARVKGLSQKLSEEEFSAALLHLAKRRGVHNVNEVEEDTGNELSTKEQI | |
| | | SRNSKALEEKYVAELQLERLKKDGEVRGSINRFKTSDYVKEAKQLLKV | |
| | | QKAYHQLDQSFIDTYIDLLETRRTYYEGPGEGSPFGWKDIKEWYEMLM | |
| | | GHCTYFPEELRSVKYAYNADLYNALNDLNNLVITRDENEKLEYYEKFQ | |
| | | IIENVFKQKKKPTLKQIAKEILVNEEDIKGYRVTSTGKPEFTNLKVYH | |
| | | DIKDITARKEIIENAELLDQIAKILTIYQSSEDIQEELTNLNSELTQE | |
| | | EIEQISNLKGYTGTHNLSLKAINLILDELWHTNDNQIAIFNRLKLVPK | |
| | | KVDLSQQKEIPTTLVDDFILSPVVKRSFIQSIKVINAIIKKYGLPNDI | |
| | | IIELAREKNSKDAQKMINEMQKRNRQTNERIEEIIRTTGKENAKYLIE | |
| | | KIKLHDMQEGKCLYSLEAIPLEDLLNNPFNYEVDHIIPRSVSFDNSFN | |
| | | NKVLVKQEENSKKGNRTPFQYLSSSDSKISYETFKKHILNLAKGKGRI | |
| | | SKTKKEYLLEERDINRFSVQKDFINRNLVDTRYATRGLMNLLRSYFRV | |
| | | NNLDVKVKSINGGFTSFLRRKWKFKKERNKGYKHHAEDALIIANADFI | |
| | | FKEWKKLDKAKKVMENQMFEEKQAESMPEIETEQEYKEIFITPHQIKH | |
| | | IKDFKDYKYSHRVDKKPNRKLINDTLYSTRKDDKGNTLIVNNLNGLYD | |
| | | KDNDKLKKLINKSPEKLLMYHHDPQTYQKLKLIMEQYGDEKNPLYKYY | |
| | | EETGNYLTKYSKKDNGPVIKKIKYYGNKLNAHLDITDDYPNSRNKVVK | |
| | | LSLKPYRFDVYLDNGVYKFVTVKNLDVIKKENYYEVNSKCYEEAKKLK | |
| | | KISNQAEFIASFYKNDLIKINGELYRVIGVNNDLLNRIEVNMIDITYR | |
| | | EYLENMNDKRPPHIIKTIASKTQSIKKYSTDILGNLYEVKSKKHPQII | |
| | | KKGGSPKKKRKVSSDYKDHDGDYKDHDIDYKDDDDKEGADKRTADGSE | |
| | | FESPKKKRKV | |
| MRNA4681 | ABE_9.51_ | MSEVEFSHEYWMRHALTLAKRARDEREVPVGAVLVLNNRVIGEGWNRA | 450 |
| | spCas9_NRN | IGLHDPTAHAEIMALRQGGLVMQNYRLYDATLYTTFEPCVMCAGAMIH | |
| | | SRIGRVVFGVRNAKTGAAGSLMDVLHHPGMNHRVEITEGILADECAAL | |
| | | LCRFFRMPRRVFNAQKKAQSSTDSGGSSGGSSGSETPGTSESATPESS | |
| | | GGSSGGSDKKYSIGLAIGTNSVGWAVITDEYKVPSKKFKVLGNTDRHS | |
| | | IKKNLIGALLFDSGETAERTRLKRTARRRYTRRKNRICYLQEIFSNEM | |
| | | AKVDDSFFHRLEESFLVEEDKKHERHPIFGNIVDEVAYHEKYPTIYHL | |
| | | RKKLVDSTDKADLRLIYLALAHMIKFRGHFLIEGDLNPDNSDVDKLFI | |
| | | QLVQTYNQLFEENPINASGVDAKAILSARLSKSRRLENLIAQLPGEKK | |
| | | NGLFGNLIALSLGLTPNFKSNFDLAEDAKLQLSKDTYDDDLDNLLAQI | |
| | | GDQYADLFLAAKNLSDAILLSDILRVNTEITKAPLSASMIKRYDEHHQ | |
| | | DLTLLKALVRQQLPEKYKEIFFDQSKNGYAGYIDGGASQEEFYKFIKP | |
| | | ILEKMDGTEELLVKLNREDLLRKQRTFDNGSIPHQIHLGELHAILRRQ | |
| | | EDFYPFLKDNREKIEKILTFRIPYYVGPLARGNSRFAWMTRKSEETIT | |
| | | PWNFEEVVDKGASAQSFIERMTNFDKNLPNEKVLPKHSLLYEYFTVYN | |
| | | ELTKVKYVTEGMRKPAFLSGEQKKAIVDLLFKTNRKVTVKQLKEDYFK | |
| | | KIECFDSVEISGVEDRFNASLGTYHDLLKIIKDKDFLDNEENEDILED | |
| | | IVLTLTLFEDREMIEERLKTYAHLFDDKVMKQLKRRRYTGWGRLSRKL | |
| | | INGIRDKQSGKTILDFLKSDGFANRNFMQLIHDDSLTFKEDIQKAQVS | |
| | | GQGDSLHEHIANLAGSPAIKKGILQTVKVVDELVKVMGRHKPENIVIE | |
| | | MARENQTTQKGQKNSRERMKRIEEGIKELGSQILKEHPVENTQLQNEK | |
| | | LYLYYLQNGRDMYVDQELDINRLSDYDVDHIVPQSFLKDDSIDNKVLT | |
| | | RSDKNRGKSDNVPSEEVVKKMKNYWRQLLNAKLITQRKFDNLTKAERG | |
| | | GLSELDKAGFIKRQLVETRQITKHVAQILDSRMNTKYDENDKLIREVK | |
| | | VITLKSKLVSDFRKDFQFYKVREINNYHHAHDAYLNAVVGTALIKKYP | |
| | | KLESEFVYGDYKVYDVRKMIAKSEQEIGKATAKYFFYSNIMNFFKTEI | |
| | | TLANGEIRKRPLIETNGETGEIVWDKGRDFATVRKVLSMPQVNIVKKT | |
| | | EVQTGGFSKESIRPKRNSDKLIARKKDWDPKKYGGFLWPTVAYSVLVV | |
| | | AKVEKGKSKKLKSVKELLGITIMERSSFEKNPIDFLEAKGYKEVKKDL | |
| | | IIKLPKYSLFELENGRKRMLASAKQLQKGNELALPSKYVNFLYLASHY | |
| | | EKLKGSPEDNEQKQLFVEQHKHYLDEIIEQISEFSKRVILADANLDKV | |
| | | LSAYNKHRDKPIREQAENIIHLFTLTRLGAPRAFKYFDTTIDPKQYRS | |
| | | TKEVLDATLIHQSITGLYETRIDLSQLGGDEGADKRTADGSEFESPKK | |
| | | KRKV | |
| MRNA3169 | ABE_8.20_IBE | MKRTADGSEFESPKKKRKVDKKYSIGLAIGTNSVGWAVITDEYKVPSK | 451 |
| | 16_SpCas9_N | KFKVLGNTDRHSIKKNLIGALLFDSGETAEATRLKRTARRRYTRRKNR | |
| | GG | ICYLQEIFSNEMAKVDDSFFHRLEESFLVEEDKKHERHPIFGNIVDEV | |
| | | AYHEKYPTIYHLRKKLVDSTDKADLRLIYLALAHMIKFRGHFLIEGDL | |
| | | NPDNSDVDKLFIQLVQTYNQLFEENPINASGVDAKAILSARLSKSRRL | |
| | | ENLIAQLPGEKKNGLFGNLIALSLGLTPNFKSNFDLAEDAKLQLSKDT | |
| | | YDDDLDNLLAQIGDQYADLFLAAKNLSDAILLSDILRVNTEITKAPLS | |
| | | ASMIKRYDEHHQDLTLLKALVRQQLPEKYKEIFFDQSKNGYAGYIDGG | |
| | | ASQEEFYKFIKPILEKMDGTEELLVKLNREDLLRKQRTFDNGSIPHQI | |
| | | HLGELHAILRRQEDFYPFLKDNREKIEKILTFRIPYYVGPLARGNSRF | |
| | | AWMTRKSEETITPWNFEEVVDKGASAQSFIERMTNFDKNLPNEKVLPK | |
| | | HSLLYEYFTVYNELTKVKYVTEGMRKPAFLSGEQKKAIVDLLFKTNRK | |
| | | VTVKQLKEDYFKKIECFDSVEISGVEDRFNASLGTYHDLLKIIKDKDF | |
| | | LDNEENEDILEDIVLTLTLFEDREMIEERLKTYAHLFDDKVMKQLKRR | |
| | | RYTGWGRLSRKLINGIRDKQSGKTILDFLKSDGFANRNFMQLIHDDSL | |
| | | TFKEDIQKAQVSGQGDSLHEHIANLAGSPAIKKGILQTVKVVDELVKV | |
| | | MGRHKPENIVIEMARENQTTQKGQKNSRERMKRIEEGIKELGSQILKE | |
| | | HPVENTQLQNEKLYLYYLQNGRDMYVDQELDINRLSDYDVDHIVPQSF | |
| | | LKDDSIDNKVLTRSDKNRGKSDNVPSEEVVKKMKNYWRQLLNAKLITQ | |
| | | RKFDNLTKAERGGLSELDKAGFIKRQLVETRQITKHVAQILDSRMNTK | |
| | | YDENDKLIREVKVITLKSKLVSDFRKDFQFYKVREINNYHHAHDAYLN | |
| | | AVVGTALIKKYPKLESEFVYGDYKVYDVRKMIAKSEQEIGKATAKYFF | |
| | | YSNIMNFFKTEITLANGEIRKRPLIETNGETGEIVWDKGRDFATVRKV | |
| | | LSMPQVNIVKKTEVQTGGFSKESILPKRNSDKLIARKKDWDPKKYGGF | |
| | | DSPTVAYSVLVVAKVEKGKSKKLKSVKELLGITIMERSSFEKNPIDFL | |
| | | EAKGYKEVKKDLIIKLPKYSLFELENGRKRMLASAGELQKGNELALPS | |
| | | KYVNFLYLASHYEKLKGGSSGSETPGTSESATPESSGSEVEFSHEYWM | |
| | | RHALTLAKRARDEREVPVGAVLVLNNRVIGEGWNRAIGLHDPTAHAEI | |
| | | MALRQGGLVMQNYRLYDATLYSTFEPCVMCAGAMIHSRIGRVVFGVRN | |
| | | AKTGAAGSLMDVLHHPGMNHRVEITEGILADECAALLCRFFRMPRRVF | |
| | | NAQKKAQSSTDSPEDNEQKQLFVEQHKHYLDEIIEQISEFSKRVILAD | |
| | | ANLDKVLSAYNKHRDKPIREQAENIIHLFTLTNLGAPAAFKYFDTTID | |
| | | RKRYTSTKEVLDATLIHQSITGLYETRIDLSQLGGDEGADKRTADGSE | |
| | | FESPKKKRKV | |
| MRNA3170 | ABE_8.20_IBE | MKRTADGSEFESPKKKRKVDKKYSIGLAIGTNSVGWAVITDEYKVPSK | 452 |
| | 12_SpCas9_N | KFKVLGNTDRHSIKKNLIGALLFDSGETAEATRLKRTARRRYTRRKNR | |
| | GC | ICYLQEIFSNEMAKVDDSFFHRLEESFLVEEDKKHERHPIFGNIVDEV | |
| | | AYHEKYPTIYHLRKKLVDSTDKADLRLIYLALAHMIKFRGHFLIEGDL | |
| | | NPDNSDVDKLFIQLVQTYNQLFEENPINASGVDAKAILSARLSKSRRL | |
| | | ENLIAQLPGEKKNGLFGNLIALSLGLTPNFKSNFDLAEDAKLQLSKDT | |
| | | YDDDLDNLLAQIGDQYADLFLAAKNLSDAILLSDILRVNTEITKAPLS | |
| | | ASMVKRYDEHHQDLTLLKALVRQQLPEKYKEIFFDQSKNGYAGYIDGG | |
| | | ASQEEFYKFIKPILEKMDGTEELLVKLNREDLLRKQRTFDNGIIPHQI | |
| | | HLGELHAILRRQGDFYPFLKDNREKIEKILTFRIPYYVGPLARGNSRF | |
| | | AWMTRKSEETITPWNFEEVVDKGASAQSFIERMTNFDKNLPNEKVLPK | |
| | | HSLLYEYFTVYNELTKVKYVTEGMRKPAFLSGEQKKAIVDLLFKTNRK | |
| | | VTVKQLKEDYFKKIECFDSVEISGVEDRFNASLGTYHDLLKIIKDKDF | |
| | | LDNEENEDILEDIVLTLTLFEDREMIEERLKTYAHLFDDKVMKQLKRL | |
| | | RYTGWGRLSRKLINGIRDKQSGKTILDFLKSDGFANRNFMQLIHDDSL | |
| | | TFKEDIQKAQVSGQGDSLHEHIANLAGSPAIKKGILQTVKVVDELVKV | |
| | | MGGHKPENIVIEMARENQTTQKGQKNSRERMKRIEEGIKELGSQILKE | |
| | | HPVENTQLQNEKLYLYYLQNGRDMYVDQELDINRLSDYDVDHIVPQSF | |
| | | LKDDSIDNKVLTRSDKNRGKSDNVPSEEVVKKMKNYWRQLLNAKLITQ | |
| | | RKFDNLTKAERGGLSELDKAGFIKRQLVETRQITKHVAQILDSRMNTK | |
| | | YDENDKLIREVKVITLKSKLVSDFRKDFQFYKVREINNYHHAHDAYLN | |
| | | AVVGTALIKKYPKLESEFVYGDYKVYDVRKMIAKSEQEIGSSGSETPG | |
| | | TSESATPESSGSEVEFSHEYWMRHALTLAKRARDEREVPVGAVLVLNN | |
| | | RVIGEGWNRAIGLHDPTAHAEIMALRQGGLVMQNYRLYDATLYSTFEP | |
| | | CVMCAGAMIHSRIGRVVFGVRNAKTGAAGSLMDVLHHPGMNHRVEITE | |
| | | GILADECAALLCRFFRMPRRVFNAQKKAQSSTDGKATAKYFFYSNIMN | |
| | | FFKTEITLANGEIRKRPLIETNGETGEIVWDKGRDFATVRKVLSMPQV | |
| | | NIVKKTEVQTGGFSKESILPKGNSDKLIARKKDWDPKKYGGFMQPTVA | |
| | | YSVLVVAKVEKGKSKKLKSVKELLGITIMERSSFEKNPIDFLEAKGYK | |
| | | EVKKDLIIKLPKYSLFELENGRKRMLASAKFLQKGNELALPSKYVNFL | |
| | | YLASHYEKLKGSPEDNEQKQLFVEQHKHYLDEIIEQISEFSKRVILAD | |
| | | ANLDKVLSAYNKHRDKPIREQAENIIHLFTLTNLGAPRAFKYFDTTIA | |
| | | RKEYRSTKEVLDATLIHQSITGLYETRIDLSQLGGDEGADKRTADGSE | |
| | | FESPKKKRKV | |
| MRNA4022 | ABE_TadA- | MSEVEFSHEYWMRHALTLAKRARDEREVPVGAVLVLNNRVIGEGWNRA | 453 |
| | 9.51_SpCas9 | IGLHDPTAHAEIMALRQGGLVMQNYRLYDATLYTTFEPCVMCAGAMIH | |
| | NRCH | SRIGRVVFGVRNAKTGAAGSLMDVLHHPGMNHRVEITEGILADECAAL | |
| | | LCRFFRMPRRVFNAQKKAQSSTDSGGSSGGSSGSETPGTSESATPESS | |
| | | GGSSGGSDKKYSIGLAIGTNSVGWAVITDEYKVPSKKFKVLGNTDRHS | |
| | | IKKNLIGALLFDSGETAEATRLKRTARRRYTRRKNRICYLQEIFSNEM | |
| | | AKVDDSFFHRLEESFLVEEDKKHERHPIFGNIVDEVAYHEKYPTIYHL | |
| | | RKKLVDSTDKADLRLIYLALAHMIKFRGHFLIEGDLNPDNSDVDKLFI | |
| | | QLVQTYNQLFEENPINASGVDAKAILSARLSKSRRLENLIAQLPGEKK | |
| | | NGLFGNLIALSLGLTPNFKSNFDLAEDAKLQLSKDTYDDDLDNLLAQI | |
| | | GDQYADLFLAAKNLSDAILLSDILRVNTEITKAPLSASMVKRYDEHHQ | |
| | | DLTLLKALVRQQLPEKYKEIFFDQSKNGYAGYIDGGASQEEFYKFIKP | |
| | | ILEKMDGTEELLVKLNREDLLRKQRTFDNGIIPHQIHLGELHAILRRQ | |
| | | GDFYPFLKDNREKIEKILTFRIPYYVGPLARGNSRFAWMTRKSEETIT | |
| | | PWNFEEVVDKGASAQSFIERMTNFDKNLPNEKVLPKHSLLYEYFTVYN | |
| | | ELTKVKYVTEGMRKPAFLSGEQKKAIVDLLFKTNRKVTVKQLKEDYFK | |
| | | KIECFDSVEISGVEDRFNASLGTYHDLLKIIKDKDFLDNEENEDILED | |
| | | IVLTLTLFEDREMIEERLKTYAHLFDDKVMKQLKRLRYTGWGRLSRKL | |
| | | INGIRDKQSGKTILDFLKSDGFANRNFMQLIHDDSLTFKEDIQKAQVS | |
| | | GQGDSLHEHIANLAGSPAIKKGILQTVKVVDELVKVMGGHKPENIVIE | |
| | | MARENQTTQKGQKNSRERMKRIEEGIKELGSQILKEHPVENTQLQNEK | |
| | | LYLYYLQNGRDMYVDQELDINRLSDYDVDHIVPQSFLKDDSIDNKVLT | |
| | | RSDKNRGKSDNVPSEEVVKKMKNYWRQLLNAKLITQRKFDNLTKAERG | |
| | | GLSELDKAGFIKRQLVETRQITKHVAQILDSRMNTKYDENDKLIREVK | |
| | | VITLKSKLVSDFRKDFQFYKVREINNYHHAHDAYLNAVVGTALIKKYP | |
| | | KLESEFVYGDYKVYDVRKMIAKSEQEIGKATAKYFFYSNIMNFFKTEI | |
| | | TLANGEIRKRPLIETNGETGEIVWDKGRDFATVRKVLSMPQVNIVKKT | |
| | | EVQTGGFSKESILPKGNSDKLIARKKDWDPKKYGGFNSPTVAYSVLVV | |
| | | AKVEKGKSKKLKSVKELLGITIMERSSFEKNPIDFLEAKGYKEVKKDL | |
| | | IIKLPKYSLFELENGRKRMLASAGVLQKGNELALPSKYVNFLYLASHY | |
| | | EKLKGSPEDNEQKQLFVEQHKHYLDEIIEQISEFSKRVILADANLDKV | |
| | | LSAYNKHRDKPIREQAENIIHLFTLTNLGAPAAFKYFDTTINRKQYNT | |
| | | TKEVLDATLIRQSITGLYETRIDLSQLGGDEGADKRTADGSEFESPKK | |
| | | KRKV | |
| MRNA4232 | ABE_9.1_SpC | MKRTADGSEFESPKKKRKVSEVEFSHEYWMRHALTLAKRARDEREVPV | 454 |
| | as9_NGC | GAVLVLNNRVIGEGWNRAIGLHDPTAHAEIMALRQGGLVMQNYRLYDA | |
| | | TLYTTFEPCVMCAGAMIHSRIGRVVFGVRNAKTGAAGSLMDVLHHPGM | |
| | | NHRVEITEGILADECAALLCRFYRMPRRVFNAQKKAQSSTDSGGSSGG | |
| | | SSGSETPGTSESATPESSGGSSGGSDKKYSIGLAIGTNSVGWAVITDE | |
| | | YKVPSKKFKVLGNTDRHSIKKNLIGALLFDSGETAEATRLKRTARRRY | |
| | | TRRKNRICYLQEIFSNEMAKVDDSFFHRLEESFLVEEDKKHERHPIFG | |
| | | NIVDEVAYHEKYPTIYHLRKKLVDSTDKADLRLIYLALAHMIKFRGHF | |
| | | LIEGDLNPDNSDVDKLFIQLVQTYNQLFEENPINASGVDAKAILSARL | |
| | | SKSRRLENLIAQLPGEKKNGLFGNLIALSLGLTPNFKSNFDLAEDAKL | |
| | | QLSKDTYDDDLDNLLAQIGDQYADLFLAAKNLSDAILLSDILRVNTEI | |
| | | TKAPLSASMVKRYDEHHQDLTLLKALVRQQLPEKYKEIFFDQSKNGYA | |
| | | GYIDGGASQEEFYKFIKPILEKMDGTEELLVKLNREDLLRKQRTFDNG | |
| | | IIPHQIHLGELHAILRRQGDFYPFLKDNREKIEKILTFRIPYYVGPLA | |
| | | RGNSRFAWMTRKSEETITPWNFEEVVDKGASAQSFIERMTNFDKNLPN | |
| | | EKVLPKHSLLYEYFTVYNELTKVKYVTEGMRKPAFLSGEQKKAIVDLL | |
| | | FKTNRKVTVKQLKEDYFKKIECFDSVEISGVEDRFNASLGTYHDLLKI | |
| | | IKDKDFLDNEENEDILEDIVLTLTLFEDREMIEERLKTYAHLFDDKVM | |
| | | KQLKRLRYTGWGRLSRKLINGIRDKQSGKTILDFLKSDGFANRNFMQL | |
| | | IHDDSLTFKEDIQKAQVSGQGDSLHEHIANLAGSPAIKKGILQTVKVV | |
| | | DELVKVMGGHKPENIVIEMARENQTTQKGQKNSRERMKRIEEGIKELG | |
| | | SQILKEHPVENTQLQNEKLYLYYLQNGRDMYVDQELDINRLSDYDVDH | |
| | | IVPQSFLKDDSIDNKVLTRSDKNRGKSDNVPSEEVVKKMKNYWRQLLN | |
| | | AKLITQRKFDNLTKAERGGLSELDKAGFIKRQLVETRQITKHVAQILD | |
| | | SRMNTKYDENDKLIREVKVITLKSKLVSDFRKDFQFYKVREINNYHHA | |
| | | HDAYLNAVVGTALIKKYPKLESEFVYGDYKVYDVRKMIAKSEQEIGKA | |
| | | TAKYFFYSNIMNFFKTEITLANGEIRKRPLIETNGETGEIVWDKGRDF | |
| | | ATVRKVLSMPQVNIVKKTEVQTGGFSKESILPKGNSDKLIARKKDWDP | |
| | | KKYGGFMQPTVAYSVLVVAKVEKGKSKKLKSVKELLGITIMERSSFEK | |
| | | NPIDFLEAKGYKEVKKDLIIKLPKYSLFELENGRKRMLASAKFLQKGN | |
| | | ELALPSKYVNFLYLASHYEKLKGSPEDNEQKQLFVEQHKHYLDEIIEQ | |
| | | ISEFSKRVILADANLDKVLSAYNKHRDKPIREQAENIIHLFTLTNLGA | |
| | | PRAFKYFDTTIARKEYRSTKEVLDATLIHQSITGLYETRIDLSQLGGD | |
| | | EGADKRTADGSEFESPKKKRKV | |
| MRNA4233 | ABE_9.2_SpC | MKRTADGSEFESPKKKRKVSEVEFSHEYWMRHALTLAKRARDEREVPV | 455 |
| | as9_NGC | GAVLVLNNRVIGEGWNRAIGLHDPTAHAEIMALRQGGLVMQNYRLYDA | |
| | | TLYTTFEPCVMCAGAMIHSRIGRVVFGVRNAKTGAAGSLMDVLHHPGM | |
| | | NHRVEITEGILADECAALLCDFYRMPRRVFNAQKKAQSSINSGGSSGG | |
| | | SSGSETPGTSESATPESSGGSSGGSDKKYSIGLAIGTNSVGWAVITDE | |
| | | YKVPSKKFKVLGNTDRHSIKKNLIGALLFDSGETAEATRLKRTARRRY | |
| | | TRRKNRICYLQEIFSNEMAKVDDSFFHRLEESFLVEEDKKHERHPIFG | |
| | | NIVDEVAYHEKYPTIYHLRKKLVDSTDKADLRLIYLALAHMIKFRGHF | |
| | | LIEGDLNPDNSDVDKLFIQLVQTYNQLFEENPINASGVDAKAILSARL | |
| | | SKSRRLENLIAQLPGEKKNGLFGNLIALSLGLTPNFKSNFDLAEDAKL | |
| | | QLSKDTYDDDLDNLLAQIGDQYADLFLAAKNLSDAILLSDILRVNTEI | |
| | | TKAPLSASMVKRYDEHHQDLTLLKALVRQQLPEKYKEIFFDQSKNGYA | |
| | | GYIDGGASQEEFYKFIKPILEKMDGTEELLVKLNREDLLRKQRTFDNG | |
| | | IIPHQIHLGELHAILRRQGDFYPFLKDNREKIEKILTFRIPYYVGPLA | |
| | | RGNSRFAWMTRKSEETITPWNFEEVVDKGASAQSFIERMTNFDKNLPN | |
| | | EKVLPKHSLLYEYFTVYNELTKVKYVTEGMRKPAFLSGEQKKAIVDLL | |
| | | FKTNRKVTVKQLKEDYFKKIECFDSVEISGVEDRFNASLGTYHDLLKI | |
| | | IKDKDFLDNEENEDILEDIVLTLTLFEDREMIEERLKTYAHLFDDKVM | |
| | | KQLKRLRYTGWGRLSRKLINGIRDKQSGKTILDFLKSDGFANRNFMQL | |
| | | IHDDSLTFKEDIQKAQVSGQGDSLHEHIANLAGSPAIKKGILQTVKVV | |
| | | DELVKVMGGHKPENIVIEMARENQTTQKGQKNSRERMKRIEEGIKELG | |
| | | SQILKEHPVENTQLQNEKLYLYYLQNGRDMYVDQELDINRLSDYDVDH | |
| | | IVPQSFLKDDSIDNKVLTRSDKNRGKSDNVPSEEVVKKMKNYWRQLLN | |
| | | AKLITQRKFDNLTKAERGGLSELDKAGFIKRQLVETRQITKHVAQILD | |
| | | SRMNTKYDENDKLIREVKVITLKSKLVSDFRKDFQFYKVREINNYHHA | |
| | | HDAYLNAVVGTALIKKYPKLESEFVYGDYKVYDVRKMIAKSEQEIGKA | |
| | | TAKYFFYSNIMNFFKTEITLANGEIRKRPLIETNGETGEIVWDKGRDF | |
| | | ATVRKVLSMPQVNIVKKTEVQTGGFSKESILPKGNSDKLIARKKDWDP | |
| | | KKYGGFMQPTVAYSVLVVAKVEKGKSKKLKSVKELLGITIMERSSFEK | |
| | | NPIDFLEAKGYKEVKKDLIIKLPKYSLFELENGRKRMLASAKFLQKGN | |
| | | ELALPSKYVNFLYLASHYEKLKGSPEDNEQKQLFVEQHKHYLDEIIEQ | |
| | | ISEFSKRVILADANLDKVLSAYNKHRDKPIREQAENIIHLFTLTNLGA | |
| | | PRAFKYFDTTIARKEYRSTKEVLDATLIHQSITGLYETRIDLSQLGGD | |
| | | EGADKRTADGSEFESPKKKRKV | |
| MRNA4234 | ABE_9.1_SpC | MKRTADGSEFESPKKKRKVSEVEFSHEYWMRHALTLAKRARDEREVPV | 456 |
| | as9_NG | GAVLVLNNRVIGEGWNRAIGLHDPTAHAEIMALRQGGLVMQNYRLYDA | |
| | | TLYTTFEPCVMCAGAMIHSRIGRVVFGVRNAKTGAAGSLMDVLHHPGM | |
| | | NHRVEITEGILADECAALLCRFYRMPRRVFNAQKKAQSSTDSGGSSGG | |
| | | SSGSETPGTSESATPESSGGSSGGSDKKYSIGLAIGTNSVGWAVITDE | |
| | | YKVPSKKFKVLGNTDRHSIKKNLIGALLFDSGETAEATRLKRTARRRY | |
| | | TRRKNRICYLQEIFSNEMAKVDDSFFHRLEESFLVEEDKKHERHPIFG | |
| | | NIVDEVAYHEKYPTIYHLRKKLVDSTDKADLRLIYLALAHMIKFRGHF | |
| | | LIEGDLNPDNSDVDKLFIQLVQTYNQLFEENPINASGVDAKAILSARL | |
| | | SKSRRLENLIAQLPGEKKNGLFGNLIALSLGLTPNFKSNFDLAEDAKL | |
| | | QLSKDTYDDDLDNLLAQIGDQYADLFLAAKNLSDAILLSDILRVNTEI | |
| | | TKAPLSASMIKRYDEHHQDLTLLKALVRQQLPEKYKEIFFDQSKNGYA | |
| | | GYIDGGASQEEFYKFIKPILEKMDGTEELLVKLNREDLLRKQRTFDNG | |
| | | SIPHQIHLGELHAILRRQEDFYPFLKDNREKIEKILTFRIPYYVGPLA | |
| | | RGNSRFAWMTRKSEETITPWNFEEVVDKGASAQSFIERMTNFDKNLPN | |
| | | EKVLPKHSLLYEYFTVYNELTKVKYVTEGMRKPAFLSGEQKKAIVDLL | |
| | | FKTNRKVTVKQLKEDYFKKIECFDSVEISGVEDRFNASLGTYHDLLKI | |
| | | IKDKDFLDNEENEDILEDIVLTLTLFEDREMIEERLKTYAHLFDDKVM | |
| | | KQLKRRRYTGWGRLSRKLINGIRDKQSGKTILDFLKSDGFANRNFMQL | |
| | | IHDDSLTFKEDIQKAQVSGQGDSLHEHIANLAGSPAIKKGILQTVKVV | |
| | | DELVKVMGRHKPENIVIEMARENQTTQKGQKNSRERMKRIEEGIKELG | |
| | | SQILKEHPVENTQLQNEKLYLYYLQNGRDMYVDQELDINRLSDYDVDH | |
| | | IVPQSFLKDDSIDNKVLTRSDKNRGKSDNVPSEEVVKKMKNYWRQLLN | |
| | | AKLITQRKFDNLTKAERGGLSELDKAGFIKRQLVETRQITKHVAQILD | |
| | | SRMNTKYDENDKLIREVKVITLKSKLVSDFRKDFQFYKVREINNYHHA | |
| | | HDAYLNAVVGTALIKKYPKLESEFVYGDYKVYDVRKMIAKSEQEIGKA | |
| | | TAKYFFYSNIMNFFKTEITLANGEIRKRPLIETNGETGEIVWDKGRDF | |
| | | ATVRKVLSMPQVNIVKKTEVQTGGFSKESIRPKRNSDKLIARKKDWDP | |
| | | KKYGGFVSPTVAYSVLVVAKVEKGKSKKLKSVKELLGITIMERSSFEK | |
| | | NPIDFLEAKGYKEVKKDLIIKLPKYSLFELENGRKRMLASARFLQKGN | |
| | | ELALPSKYVNFLYLASHYEKLKGSPEDNEQKQLFVEQHKHYLDEIIEQ | |
| | | ISEFSKRVILADANLDKVLSAYNKHRDKPIREQAENIIHLFTLTNLGA | |
| | | PRAFKYFDTTIDRKAYRSTKEVLDATLIHQSITGLYETRIDLSQLGGD | |
| | | EGADKRTADGSEFESPKKKRKV | |
| MRNA4235 | ABE_9.2_SpC | MKRTADGSEFESPKKKRKVSEVEFSHEYWMRHALTLAKRARDEREVPV | 457 |
| | as9_NG | GAVLVLNNRVIGEGWNRAIGLHDPTAHAEIMALRQGGLVMQNYRLYDA | |
| | | TLYTTFEPCVMCAGAMIHSRIGRVVFGVRNAKTGAAGSLMDVLHHPGM | |
| | | NHRVEITEGILADECAALLCDFYRMPRRVFNAQKKAQSSINSGGSSGG | |
| | | SSGSETPGTSESATPESSGGSSGGSDKKYSIGLAIGTNSVGWAVITDE | |
| | | YKVPSKKFKVLGNTDRHSIKKNLIGALLFDSGETAEATRLKRTARRRY | |
| | | TRRKNRICYLQEIFSNEMAKVDDSFFHRLEESFLVEEDKKHERHPIFG | |
| | | NIVDEVAYHEKYPTIYHLRKKLVDSTDKADLRLIYLALAHMIKFRGHF | |
| | | LIEGDLNPDNSDVDKLFIQLVQTYNQLFEENPINASGVDAKAILSARL | |
| | | SKSRRLENLIAQLPGEKKNGLFGNLIALSLGLTPNFKSNFDLAEDAKL | |
| | | QLSKDTYDDDLDNLLAQIGDQYADLFLAAKNLSDAILLSDILRVNTEI | |
| | | TKAPLSASMIKRYDEHHQDLTLLKALVRQQLPEKYKEIFFDQSKNGYA | |
| | | GYIDGGASQEEFYKFIKPILEKMDGTEELLVKLNREDLLRKQRTFDNG | |
| | | SIPHQIHLGELHAILRRQEDFYPFLKDNREKIEKILTFRIPYYVGPLA | |
| | | RGNSRFAWMTRKSEETITPWNFEEVVDKGASAQSFIERMTNFDKNLPN | |
| | | EKVLPKHSLLYEYFTVYNELTKVKYVTEGMRKPAFLSGEQKKAIVDLL | |
| | | FKTNRKVTVKQLKEDYFKKIECFDSVEISGVEDRFNASLGTYHDLLKI | |
| | | IKDKDFLDNEENEDILEDIVLTLTLFEDREMIEERLKTYAHLFDDKVM | |
| | | KQLKRRRYTGWGRLSRKLINGIRDKQSGKTILDFLKSDGFANRNFMQL | |
| | | IHDDSLTFKEDIQKAQVSGQGDSLHEHIANLAGSPAIKKGILQTVKVV | |
| | | DELVKVMGRHKPENIVIEMARENQTTQKGQKNSRERMKRIEEGIKELG | |
| | | SQILKEHPVENTQLQNEKLYLYYLQNGRDMYVDQELDINRLSDYDVDH | |
| | | IVPQSFLKDDSIDNKVLTRSDKNRGKSDNVPSEEVVKKMKNYWRQLLN | |
| | | AKLITQRKFDNLTKAERGGLSELDKAGFIKRQLVETRQITKHVAQILD | |
| | | SRMNTKYDENDKLIREVKVITLKSKLVSDFRKDFQFYKVREINNYHHA | |
| | | HDAYLNAVVGTALIKKYPKLESEFVYGDYKVYDVRKMIAKSEQEIGKA | |
| | | TAKYFFYSNIMNFFKTEITLANGEIRKRPLIETNGETGEIVWDKGRDF | |
| | | ATVRKVLSMPQVNIVKKTEVQTGGFSKESIRPKRNSDKLIARKKDWDP | |
| | | KKYGGFVSPTVAYSVLVVAKVEKGKSKKLKSVKELLGITIMERSSFEK | |
| | | NPIDFLEAKGYKEVKKDLIIKLPKYSLFELENGRKRMLASARFLQKGN | |
| | | ELALPSKYVNFLYLASHYEKLKGSPEDNEQKQLFVEQHKHYLDEIIEQ | |
| | | ISEFSKRVILADANLDKVLSAYNKHRDKPIREQAENIIHLFTLTNLGA | |
| | | PRAFKYFDTTIDRKAYRSTKEVLDATLIHQSITGLYETRIDLSQLGGD | |
| | | EGADKRTADGSEFESPKKKRKV | |
| MRNA4684 | ABE_TadA- | MSEVEFSHEYWMRHALTLAKRARDEREVPVGAVLVLNNRVIGEGWNRA | 458 |
| | 9.51_SpCas9 | IGLHDPTAHAEIMALRQGGLVMQNYRLYDATLYTTFEPCVMCAGAMIH | |
| | NG | SRIGRVVFGVRNAKTGAAGSLMDVLHHPGMNHRVEITEGILADECAAL | |
| | | LCRFFRMPRRVFNAQKKAQSSTDSGGSSGGSSGSETPGTSESATPESS | |
| | | GGSSGGSDKKYSIGLAIGTNSVGWAVITDEYKVPSKKFKVLGNTDRHS | |
| | | IKKNLIGALLFDSGETAEATRLKRTARRRYTRRKNRICYLQEIFSNEM | |
| | | AKVDDSFFHRLEESFLVEEDKKHERHPIFGNIVDEVAYHEKYPTIYHL | |
| | | RKKLVDSTDKADLRLIYLALAHMIKFRGHFLIEGDLNPDNSDVDKLFI | |
| | | QLVQTYNQLFEENPINASGVDAKAILSARLSKSRRLENLIAQLPGEKK | |
| | | NGLFGNLIALSLGLTPNFKSNFDLAEDAKLQLSKDTYDDDLDNLLAQI | |
| | | GDQYADLFLAAKNLSDAILLSDILRVNTEITKAPLSASMIKRYDEHHQ | |
| | | DLTLLKALVRQQLPEKYKEIFFDQSKNGYAGYIDGGASQEEFYKFIKP | |
| | | ILEKMDGTEELLVKLNREDLLRKQRTFDNGSIPHQIHLGELHAILRRQ | |
| | | EDFYPFLKDNREKIEKILTFRIPYYVGPLARGNSRFAWMTRKSEETIT | |
| | | PWNFEEVVDKGASAQSFIERMTNFDKNLPNEKVLPKHSLLYEYFTVYN | |
| | | ELTKVKYVTEGMRKPAFLSGEQKKAIVDLLFKTNRKVTVKQLKEDYFK | |
| | | KIECFDSVEISGVEDRFNASLGTYHDLLKIIKDKDFLDNEENEDILED | |
| | | IVLTLTLFEDREMIEERLKTYAHLFDDKVMKQLKRRRYTGWGRLSRKL | |
| | | INGIRDKQSGKTILDFLKSDGFANRNFMQLIHDDSLTFKEDIQKAQVS | |
| | | GQGDSLHEHIANLAGSPAIKKGILQTVKVVDELVKVMGRHKPENIVIE | |
| | | MARENQTTQKGQKNSRERMKRIEEGIKELGSQILKEHPVENTQLQNEK | |
| | | LYLYYLQNGRDMYVDQELDINRLSDYDVDHIVPQSFLKDDSIDNKVLT | |
| | | RSDKNRGKSDNVPSEEVVKKMKNYWRQLLNAKLITQRKFDNLTKAERG | |
| | | GLSELDKAGFIKRQLVETRQITKHVAQILDSRMNTKYDENDKLIREVK | |
| | | VITLKSKLVSDFRKDFQFYKVREINNYHHAHDAYLNAVVGTALIKKYP | |
| | | KLESEFVYGDYKVYDVRKMIAKSEQEIGKATAKYFFYSNIMNFFKTEI | |
| | | TLANGEIRKRPLIETNGETGEIVWDKGRDFATVRKVLSMPQVNIVKKT | |
| | | EVQTGGFSKESILPKRNSDKLIARKKDWDPKKYGGFLWPTVAYSVLVV | |
| | | AKVEKGKSKKLKSVKELLGITIMERSSFEKNPIDFLEAKGYKEVKKDL | |
| | | IIKLPKYSLFELENGRKRMLASAKQLQKGNELALPSKYVNFLYLASHY | |
| | | EKLKGSPEDNEQKQLFVEQHKHYLDEIIEQISEFSKRVILADANLDKV | |
| | | LSAYNKHRDKPIREQAENIIHLFTLTNLGAPAAFKYFDTTIDRKQYRS | |
| | | TKEVLDATLIHQSITGLYETRIDLSQLGGDEGADKRTADGSEFESPKK | |
| | | KRKV | |
| MRNA3921 | ABE_9.51_Sp | MKRTADGSEFESPKKKRKVSEVEFSHEYWMRHALTLAKRARDEREVPV | 459 |
| | Cas9_NRTH | GAVLVLNNRVIGEGWNRAIGLHDPTAHAEIMALRQGGLVMQNYRLYDA | |
| | | TLYTTFEPCVMCAGAMIHSRIGRVVFGVRNAKTGAAGSLMDVLHHPGM | |
| | | NHRVEITEGILADECAALLCRFFRMPRRVFNAQKKAQSSTDSGGSSGG | |
| | | SSGSETPGTSESATPESSGGSSGGSDKKYSIGLAIGTNSVGWAVITDE | |
| | | YKVPSKKFKVLGNTDRHSIKKNLIGALLFDSGETAEATRLKRTARRRY | |
| | | TRRKNRICYLQEIFSNEMAKVDDSFFHRLEESFLVEEDKKHERHPIFG | |
| | | NIVDEVAYHEKYPTIYHLRKKLVDSTDKADLRLIYLALAHMIKFRGHF | |
| | | LIEGDLNPDNSDVDKLFIQLVQTYNQLFEENPINASGVDAKAILSARL | |
| | | SKSRRLENLIAQLPGEKKNGLFGNLIALSLGLTPNFKSNFDLAEDAKL | |
| | | QLSKDTYDDDLDNLLAQIGDQYADLFLAAKNLSDAILLSDILRVNTEI | |
| | | TKAPLSASMVKRYDEHHQDLTLLKALVRQQLPEKYKEIFFDQSKNGYA | |
| | | GYIDGGASQEEFYKFIKPILEKMDGTEELLVKLNREDLLRKQRTFDNG | |
| | | IIPHQIHLGELHAILRRQGDFYPFLKDNREKIEKILTFRIPYYVGPLA | |
| | | RGNSRFAWMTRKSEETITPWNFEEVVDKGASAQSFIERMTNFDKNLPN | |
| | | EKVLPKHSLLYEYFTVYNELTKVKYVTEGMRKPAFLSGEQKKAIVDLL | |
| | | FKTNRKVTVKQLKEDYFKKIECFDSVEISGVEDRFNASLGTYHDLLKI | |
| | | IKDKDFLDNEENEDILEDIVLTLTLFEDREMIEERLKTYAHLFDDKVM | |
| | | KQLKRLRYTGWGRLSRKLINGIRDKQSGKTILDFLKSDGFANRNFMQL | |
| | | IHDDSLTFKEDIQKAQVSGQGDSLHEHIANLAGSPAIKKGILQTVKVV | |
| | | DELVKVMGGHKPENIVIEMARENQTTQKGQKNSRERMKRIEEGIKELG | |
| | | SQILKEHPVENTQLQNEKLYLYYLQNGRDMYVDQELDINRLSDYDVDH | |
| | | IVPQSFLKDDSIDNKVLTRSDKNRGKSDNVPSEEVVKKMKNYWRQLLN | |
| | | AKLITQRKFDNLTKAERGGLSELDKAGFIKRQLVETRQITKHVAQILD | |
| | | SRMNTKYDENDKLIREVKVITLKSKLVSDFRKDFQFYKVREINNYHHA | |
| | | HDAYLNAVVGTALIKKYPKLESEFVYGDYKVYDVRKMIAKSEQEIGKA | |
| | | TAKYFFYSNIMNFFKTEITLANGEIRKRPLIETNGETGEIVWDKGRDF | |
| | | ATVRKVLSMPQVNIVKKTEVQTGGFSKESILPKGNSDKLIARKKDWDP | |
| | | KKYGGFNSPTVAYSVLVVAKVEKGKSKKLKSVKELLGITIMERSSFEK | |
| | | NPIGFLEAKGYKEVKKDLIIKLPKYSLFELENGRKRMLASASVLHKGN | |
| | | ELALPSKYVNFLYLASHYEKLKGSSEDNKQKQLFVEQHKHYLDEIIEQ | |
| | | ISEFSKRVILADANLDKVLSAYNKHRDKPIREQAENIIHLFTLTNLGA | |
| | | SAAFKYFDTTIGRKLYTSTKEVLDATLIHQSITGLYETRIDLSQLGGD | |
| | | EGADKRTADGSEFESPKKKRKV | |
| MRNA4236 | ABE_9.1_SpC | MKRTADGSEFESPKKKRKVSEVEFSHEYWMRHALTLAKRARDEREVPV | 460 |
| | as9_NRTH | GAVLVLNNRVIGEGWNRAIGLHDPTAHAEIMALRQGGLVMQNYRLYDA | |
| | | TLYTTFEPCVMCAGAMIHSRIGRVVFGVRNAKTGAAGSLMDVLHHPGM | |
| | | NHRVEITEGILADECAALLCRFYRMPRRVFNAQKKAQSSTDSGGSSGG | |
| | | SSGSETPGTSESATPESSGGSSGGSDKKYSIGLAIGTNSVGWAVITDE | |
| | | YKVPSKKFKVLGNTDRHSIKKNLIGALLFDSGETAEATRLKRTARRRY | |
| | | TRRKNRICYLQEIFSNEMAKVDDSFFHRLEESFLVEEDKKHERHPIFG | |
| | | NIVDEVAYHEKYPTIYHLRKKLVDSTDKADLRLIYLALAHMIKFRGHF | |
| | | LIEGDLNPDNSDVDKLFIQLVQTYNQLFEENPINASGVDAKAILSARL | |
| | | SKSRRLENLIAQLPGEKKNGLFGNLIALSLGLTPNFKSNFDLAEDAKL | |
| | | QLSKDTYDDDLDNLLAQIGDQYADLFLAAKNLSDAILLSDILRVNTEI | |
| | | TKAPLSASMVKRYDEHHQDLTLLKALVRQQLPEKYKEIFFDQSKNGYA | |
| | | GYIDGGASQEEFYKFIKPILEKMDGTEELLVKLNREDLLRKQRTFDNG | |
| | | IIPHQIHLGELHAILRRQGDFYPFLKDNREKIEKILTFRIPYYVGPLA | |
| | | RGNSRFAWMTRKSEETITPWNFEEVVDKGASAQSFIERMTNFDKNLPN | |
| | | EKVLPKHSLLYEYFTVYNELTKVKYVTEGMRKPAFLSGEQKKAIVDLL | |
| | | FKTNRKVTVKQLKEDYFKKIECFDSVEISGVEDRFNASLGTYHDLLKI | |
| | | IKDKDFLDNEENEDILEDIVLTLTLFEDREMIEERLKTYAHLFDDKVM | |
| | | KQLKRLRYTGWGRLSRKLINGIRDKQSGKTILDFLKSDGFANRNFMQL | |
| | | IHDDSLTFKEDIQKAQVSGQGDSLHEHIANLAGSPAIKKGILQTVKVV | |
| | | DELVKVMGGHKPENIVIEMARENQTTQKGQKNSRERMKRIEEGIKELG | |
| | | SQILKEHPVENTQLQNEKLYLYYLQNGRDMYVDQELDINRLSDYDVDH | |
| | | IVPQSFLKDDSIDNKVLTRSDKNRGKSDNVPSEEVVKKMKNYWRQLLN | |
| | | AKLITQRKFDNLTKAERGGLSELDKAGFIKRQLVETRQITKHVAQILD | |
| | | SRMNTKYDENDKLIREVKVITLKSKLVSDFRKDFQFYKVREINNYHHA | |
| | | HDAYLNAVVGTALIKKYPKLESEFVYGDYKVYDVRKMIAKSEQEIGKA | |
| | | TAKYFFYSNIMNFFKTEITLANGEIRKRPLIETNGETGEIVWDKGRDF | |
| | | ATVRKVLSMPQVNIVKKTEVQTGGFSKESILPKGNSDKLIARKKDWDP | |
| | | KKYGGFNSPTVAYSVLVVAKVEKGKSKKLKSVKELLGITIMERSSFEK | |
| | | NPIGFLEAKGYKEVKKDLIIKLPKYSLFELENGRKRMLASASVLHKGN | |
| | | ELALPSKYVNFLYLASHYEKLKGSSEDNKQKQLFVEQHKHYLDEIIEQ | |
| | | ISEFSKRVILADANLDKVLSAYNKHRDKPIREQAENIIHLFTLTNLGA | |
| | | SAAFKYFDTTIGRKLYTSTKEVLDATLIHQSITGLYETRIDLSQLGGD | |
| | | EGADKRTADGSEFESPKKKRKV | |
| MRNA4237 | ABE_9.2_SpC | MKRTADGSEFESPKKKRKVSEVEFSHEYWMRHALTLAKRARDEREVPV | 461 |
| | as9_NRTH | GAVLVLNNRVIGEGWNRAIGLHDPTAHAEIMALRQGGLVMQNYRLYDA | |
| | | TLYTTFEPCVMCAGAMIHSRIGRVVFGVRNAKTGAAGSLMDVLHHPGM | |
| | | NHRVEITEGILADECAALLCDFYRMPRRVFNAQKKAQSSINSGGSSGG | |
| | | SSGSETPGTSESATPESSGGSSGGSDKKYSIGLAIGTNSVGWAVITDE | |
| | | YKVPSKKFKVLGNTDRHSIKKNLIGALLFDSGETAEATRLKRTARRRY | |
| | | TRRKNRICYLQEIFSNEMAKVDDSFFHRLEESFLVEEDKKHERHPIFG | |
| | | NIVDEVAYHEKYPTIYHLRKKLVDSTDKADLRLIYLALAHMIKFRGHF | |
| | | LIEGDLNPDNSDVDKLFIQLVQTYNQLFEENPINASGVDAKAILSARL | |
| | | SKSRRLENLIAQLPGEKKNGLFGNLIALSLGLTPNFKSNFDLAEDAKL | |
| | | QLSKDTYDDDLDNLLAQIGDQYADLFLAAKNLSDAILLSDILRVNTEI | |
| | | TKAPLSASMVKRYDEHHQDLTLLKALVRQQLPEKYKEIFFDQSKNGYA | |
| | | GYIDGGASQEEFYKFIKPILEKMDGTEELLVKLNREDLLRKQRTFDNG | |
| | | IIPHQIHLGELHAILRRQGDFYPFLKDNREKIEKILTFRIPYYVGPLA | |
| | | RGNSRFAWMTRKSEETITPWNFEEVVDKGASAQSFIERMTNFDKNLPN | |
| | | EKVLPKHSLLYEYFTVYNELTKVKYVTEGMRKPAFLSGEQKKAIVDLL | |
| | | FKTNRKVTVKQLKEDYFKKIECFDSVEISGVEDRFNASLGTYHDLLKI | |
| | | IKDKDFLDNEENEDILEDIVLTLTLFEDREMIEERLKTYAHLFDDKVM | |
| | | KQLKRLRYTGWGRLSRKLINGIRDKQSGKTILDFLKSDGFANRNFMQL | |
| | | IHDDSLTFKEDIQKAQVSGQGDSLHEHIANLAGSPAIKKGILQTVKVV | |
| | | DELVKVMGGHKPENIVIEMARENQTTQKGQKNSRERMKRIEEGIKELG | |
| | | SQILKEHPVENTQLQNEKLYLYYLQNGRDMYVDQELDINRLSDYDVDH | |
| | | IVPQSFLKDDSIDNKVLTRSDKNRGKSDNVPSEEVVKKMKNYWRQLLN | |
| | | AKLITQRKFDNLTKAERGGLSELDKAGFIKRQLVETRQITKHVAQILD | |
| | | SRMNTKYDENDKLIREVKVITLKSKLVSDFRKDFQFYKVREINNYHHA | |
| | | HDAYLNAVVGTALIKKYPKLESEFVYGDYKVYDVRKMIAKSEQEIGKA | |
| | | TAKYFFYSNIMNFFKTEITLANGEIRKRPLIETNGETGEIVWDKGRDF | |
| | | ATVRKVLSMPQVNIVKKTEVQTGGFSKESILPKGNSDKLIARKKDWDP | |
| | | KKYGGFNSPTVAYSVLVVAKVEKGKSKKLKSVKELLGITIMERSSFEK | |
| | | NPIGFLEAKGYKEVKKDLIIKLPKYSLFELENGRKRMLASASVLHKGN | |
| | | ELALPSKYVNFLYLASHYEKLKGSSEDNKQKQLFVEQHKHYLDEIIEQ | |
| | | ISEFSKRVILADANLDKVLSAYNKHRDKPIREQAENIIHLFTLTNLGA | |
| | | SAAFKYFDTTIGRKLYTSTKEVLDATLIHQSITGLYETRIDLSQLGGD | |
| | | EGADKRTADGSEFESPKKKRKV | |
| MRNA2960 | ABE_8.20_IBE | MKRTADGSEFESPKKKRKVDKKYSIGLAIGTNSVGWAVITDEYKVPSK | 462 |
| | 12_SpCas9_N | KFKVLGNTDRHSIKKNLIGALLFDSGETAEATRLKRTARRRYTRRKNR | |
| | GG | ICYLQEIFSNEMAKVDDSFFHRLEESFLVEEDKKHERHPIFGNIVDEV | |
| | | AYHEKYPTIYHLRKKLVDSTDKADLRLIYLALAHMIKFRGHFLIEGDL | |
| | | NPDNSDVDKLFIQLVQTYNQLFEENPINASGVDAKAILSARLSKSRRL | |
| | | ENLIAQLPGEKKNGLFGNLIALSLGLTPNFKSNFDLAEDAKLQLSKDT | |
| | | YDDDLDNLLAQIGDQYADLFLAAKNLSDAILLSDILRVNTEITKAPLS | |
| | | ASMIKRYDEHHQDLTLLKALVRQQLPEKYKEIFFDQSKNGYAGYIDGG | |
| | | ASQEEFYKFIKPILEKMDGTEELLVKLNREDLLRKQRTFDNGSIPHQI | |
| | | HLGELHAILRRQEDFYPFLKDNREKIEKILTFRIPYYVGPLARGNSRF | |
| | | AWMTRKSEETITPWNFEEVVDKGASAQSFIERMTNFDKNLPNEKVLPK | |
| | | HSLLYEYFTVYNELTKVKYVTEGMRKPAFLSGEQKKAIVDLLFKTNRK | |
| | | VTVKQLKEDYFKKIECFDSVEISGVEDRFNASLGTYHDLLKIIKDKDF | |
| | | LDNEENEDILEDIVLTLTLFEDREMIEERLKTYAHLFDDKVMKQLKRR | |
| | | RYTGWGRLSRKLINGIRDKQSGKTILDFLKSDGFANRNFMQLIHDDSL | |
| | | TFKEDIQKAQVSGQGDSLHEHIANLAGSPAIKKGILQTVKVVDELVKV | |
| | | MGRHKPENIVIEMARENQTTQKGQKNSRERMKRIEEGIKELGSQILKE | |
| | | HPVENTQLQNEKLYLYYLQNGRDMYVDQELDINRLSDYDVDHIVPQSF | |
| | | LKDDSIDNKVLTRSDKNRGKSDNVPSEEVVKKMKNYWRQLLNAKLITQ | |
| | | RKFDNLTKAERGGLSELDKAGFIKRQLVETRQITKHVAQILDSRMNTK | |
| | | YDENDKLIREVKVITLKSKLVSDFRKDFQFYKVREINNYHHAHDAYLN | |
| | | AVVGTALIKKYPKLESEFVYGDYKVYDVRKMIAKSEQEIGSSGSETPG | |
| | | TSESATPESSGSEVEFSHEYWMRHALTLAKRARDEREVPVGAVLVLNN | |
| | | RVIGEGWNRAIGLHDPTAHAEIMALRQGGLVMQNYRLYDATLYSTFEP | |
| | | CVMCAGAMIHSRIGRVVFGVRNAKTGAAGSLMDVLHHPGMNHRVEITE | |
| | | GILADECAALLCRFFRMPRRVFNAQKKAQSSTDGKATAKYFFYSNIMN | |
| | | FFKTEITLANGEIRKRPLIETNGETGEIVWDKGRDFATVRKVLSMPQV | |
| | | NIVKKTEVQTGGFSKESILPKRNSDKLIARKKDWDPKKYGGFDSPTVA | |
| | | YSVLVVAKVEKGKSKKLKSVKELLGITIMERSSFEKNPIDFLEAKGYK | |
| | | EVKKDLIIKLPKYSLFELENGRKRMLASAGELQKGNELALPSKYVNFL | |
| | | YLASHYEKLKGSPEDNEQKQLFVEQHKHYLDEIIEQISEFSKRVILAD | |
| | | ANLDKVLSAYNKHRDKPIREQAENIIHLFTLTNLGAPAAFKYFDTTID | |
| | | RKRYTSTKEVLDATLIHQSITGLYETRIDLSQLGGDEGADKRTADGSE | |
| | | FESPKKKRKV | |

### Nucleobase Editors

[0152] Useful in the methods and compositions described herein are nucleobase editors that edit, modify or alter a target nucleotide sequence of a polynucleotide. Nucleobase editors described herein typically include a polynucleotide programmable nucleotide binding domain and a nucleobase editing domain (e.g., adenosine deaminase, cytidine deaminase, or a dual deaminase). A polynucleotide programmable nucleotide binding domain, when in conjunction with a bound guide polynucleotide (e.g., gRNA), can specifically bind to a target polynucleotide sequence and thereby localize the base editor to the target nucleic acid sequence desired to be edited.

### Polynucleotide Programmable Nucleotide Binding Domain

[0153] Polynucleotide programmable nucleotide binding domains bind polynucleotides (e.g., RNA, DNA). A polynucleotide programmable nucleotide binding domain of a base editor can itself comprise one or more domains (e.g., one or more nuclease domains). In some embodiments, the nuclease domain of a polynucleotide programmable nucleotide binding domain comprises an endonuclease or an exonuclease.

[0154] Disclosed herein are base editors comprising a polynucleotide programmable nucleotide binding domain comprising all or a portion (e.g., a functional portion) of a CRISPR protein (i.e., a base editor comprising as a domain all or a portion (e.g., a functional portion) of a CRISPR protein (e.g., a Cas protein), also referred to as a “CRISPR protein-derived domain” of the base editor). A CRISPR protein-derived domain incorporated into a base editor can be modified compared to a wild-type or natural version of the CRISPR protein. A CRISPR protein-derived domain can comprise one or more mutations, insertions, deletions, rearrangements and/or recombinations relative to a wild-type or natural version of the CRISPR protein.

[0155] Cas proteins that can be used herein include class 1 and class 2. Non-limiting examples of Cas proteins include Cas1, Cas1B, Cas2, Cas3, Cas4, Cas5, Cas5d, Cas5t, Cas5h, Cas5a, Cas6, Cas7, Cas8, Cas9 (also known as Csn1 or Csx12), Cas10, Csy1, Csy2, Csy3, Csy4, Cse1, Cse2, Cse3, Cse4, Cse5e, Csc1, Csc2, Csa5, Csn1, Csn2, Csm1, Csm2, Csm3, Csm4, Csm5, Csm6, Cmr1, Cmr3, Cmr4, Cmr5, Cmr6, Csb1, Csb2, Csb3, Csx17, Csx14, Csx10, Csx16, CsaX, Csx3, Csx1, Csx1S, Csf1, Csf2, CsO, Csf4, Csd1, Csd2, Cst1, Cst2, Csh1, Csh2, Csa1, Csa2, Csa3, Csa4, Csa5, Cas12a/Cpf1, Cas12b/C2c1 (e.g., SEQ ID NO: 232), Cas12c/C2c3, Cas12d/CasY, Cas12e/CasX, Cas12g, Cas12h, Cas12i, and Cas12j/CasΦ, CARF, DinG, Turbo Cas9 (i.e., an SpCas9 with the amino acid alterations Q844R, V842L, F846Y, L847M, and I852F), homologues thereof, or modified versions thereof. A CRISPR enzyme can direct cleavage of one or both strands at a target sequence, such as within a target sequence and/or within a complement of a target sequence. For example, a CRISPR enzyme can direct cleavage of one or both strands within about 1, 2, 3, 4, 5, 6, 7, 8, 9, 10, 15, 20, 25, 50, 100, 200, 500, or more base pairs from the first or last nucleotide of a target sequence.

[0156] A vector that encodes a CRISPR enzyme that is mutated to with respect to a corresponding wild-type enzyme such that the mutated CRISPR enzyme lacks the ability to cleave one or both strands of a target polynucleotide containing a target sequence can be used. A Cas protein (e.g., Cas9, Cas12) or a Cas domain (e.g., Cas9, Cas12) can refer to a polypeptide or domain with at least or at least about 50%, 60%, 70%, 80%, 90%, 91%, 92%, 93%, 94%, 95%, 96%, 97%, 98%, 99%, or 100% sequence identity and/or sequence homology to a wild-type exemplary Cas polypeptide or Cas domain. Cas (e.g., Cas9, Cas12) can refer to the wild-type or a modified form of the Cas protein that can comprise an amino acid change such as a deletion, insertion, substitution, variant, mutation, fusion, chimera, or any combination thereof. In some embodiments, a CRISPR protein-derived domain of a base editor can include all or a portion (e.g., a functional portion) of Cas9 from Corynebacterium ulcerans (NCBI Refs: NC_015683.1, NC_017317.1); Corynebacterium diphtheria (NCBI Refs: NC_016782.1, NC_016786.1); Spiroplasma syrphidicola (NCBI Ref: NC_021284.1); Prevotella intermedia (NCBI Ref: NC_017861.1); Spiroplasma taiwanense (NCBI Ref: NC_021846.1); Streptococcus iniae (NCBI Ref: NC_021314.1); Belliella baltica (NCBI Ref: NC_018010.1); Psychroflexus torquis (NCBI Ref: NC_018721.1); Streptococcus thermophilus (NCBI Ref: YP_820832.1); Listeria innocua (NCBI Ref: NP_472073.1); Campylobacter jejuni (NCBI Ref: YP_002344900.1); Neisseria meningitidis (NCBI Ref: YP_002342100.1), Streptococcus pyogenes, or Staphylococcus aureus.

[0157] Some aspects of the disclosure provide high fidelity Cas9 domains. High fidelity Cas9 domains are known in the art and described, for example, in Kleinstiver, B. P., et al. “High-fidelity CRISPR-Cas9 nucleases with no detectable genome-wide off-target effects.” Nature 529, 490-495 (2016); and Slaymaker, I. M., et al. “Rationally engineered Cas9 nucleases with improved specificity.” Science 351, 84-88 (2015); the entire contents of each of which are incorporated herein by reference. An Exemplary high fidelity Cas9 domain is provided in the Sequence Listing as SEQ ID NO: 233.

[0158] In some embodiments, any of the Cas9 fusion proteins or complexes provided herein comprise one or more of a D10A, N497X, a R661X, a Q695X, and/or a Q926X mutation, or a corresponding mutation in any of the amino acid sequences provided herein, wherein X is any amino acid.

[0159] Typically, Cas9 proteins, such as Cas9 from S. pyogenes (spCas9), require a “protospacer adjacent motif (PAM)” or PAM-like motif, which is a 2-6 base pair DNA sequence immediately following the DNA sequence targeted by the Cas9 nuclease in the CRISPR bacterial adaptive immune system. The presence of an NGG PAM sequence is required to bind a particular nucleic acid region, where the “N” in “NGG” is adenosine (A), thymidine (T), or cytosine (C), and the G is guanosine. In some embodiments, any of the fusion proteins or complexes provided herein may contain a Cas9 domain that is capable of binding a nucleotide sequence that does not contain a canonical (e.g., NGG) PAM sequence. Cas9 domains that bind to non-canonical PAM sequences have been described in the art and would be apparent to the skilled artisan. For example, Cas9 domains that bind non-canonical PAM sequences have been described in Kleinstiver, B. P., et al., “Engineered CRISPR-Cas9 nucleases with altered PAM specificities” Nature 523, 481-485 (2015); and Kleinstiver, B. P., et al., “Broadening the targeting range of Staphylococcus aureus CRISPR-Cas9 by modifying PAM recognition” Nature Biotechnology 33, 1293-1298 (2015); the entire contents of each are hereby incorporated by reference.

[0160] In some embodiments, the napDNAbp is a circular permutant (e.g., SEQ ID NO: 238).

[0161] In some embodiments, the polynucleotide programmable nucleotide binding domain comprises a nickase domain. Herein the term “nickase” refers to a polynucleotide programmable nucleotide binding domain comprising a nuclease domain that is capable of cleaving only one strand of the two strands in a duplexed nucleic acid molecule (e.g., DNA). For example, where a polynucleotide programmable nucleotide binding domain comprises a nickase domain derived from Cas9, the Cas9-derived nickase domain can include a D10A mutation and a histidine at position 840. In another example, a Cas9-derived nickase domain comprises an H840A mutation, while the amino acid residue at position 10 remains a D.

[0162] In some embodiments, a Cas9 nuclease has an inactive (e.g., an inactivated) DNA cleavage domain, that is, the Cas9 is a nickase, referred to as an “nCas9” protein (for “nickase” Cas9; SEQ ID NO: 201). The Cas9 nickase may be a Cas9 protein that is capable of cleaving only one strand of a duplexed nucleic acid molecule (e.g., a duplexed DNA molecule). In some embodiments the Cas9 nickase comprises an amino acid sequence that is at least 60%, at least 65%, at least 70%, at least 75%, at least 80%, at least 85%, at least 90%, at least 95%, at least 96%, at least 97%, at least 98%, at least 99%, or at least 99.5% identical to any one of the Cas9 nickases provided herein. Additional suitable Cas9 nickases will be apparent to those of skill in the art based on this disclosure and knowledge in the field and are within the scope of this disclosure.

[0163] Also provided herein are base editors comprising a polynucleotide programmable nucleotide binding domain which is catalytically dead (i.e., incapable of cleaving a target polynucleotide sequence). For example, in the case of a base editor comprising a Cas9 domain, the Cas9 can comprise both a D10A mutation and an H840A mutation. In further embodiments, a catalytically dead polynucleotide programmable nucleotide binding domain comprises a point mutation (e.g., D10A or H840A) as well as a deletion of all or a portion (e.g., a functional portion) of a nuclease domain. dCas9 domains are known in the art and described, for example, in Qi et al., “Repurposing CRISPR as an RNA-guided platform for sequence-specific control of gene expression.” Cell. 2013; 152 (5): 1173-83, the entire contents of which are incorporated herein by reference.

[0164] The term “protospacer adjacent motif (PAM)” or PAM-like motif refers to a 2-6 base pair DNA sequence immediately following the DNA sequence targeted by a nucleic acid programmable DNA binding protein. In some embodiments, the PAM can be a 5′ PAM (i.e., located upstream of the 5′ end of the protospacer). In other embodiments, the PAM can be a 3′ PAM (i.e., located downstream of the 5′ end of the protospacer). The PAM sequence can be any PAM sequence known in the art. Suitable PAM sequences include, but are not limited to, NGG, NGA, NGC, NGN, NGT, NGTT, NGCG, NGAG, NGAN, NGNG, NGCN, NGCG, NGTN, NNGRRT, NNNRRT, NNGRR(N), TTTV, TYCV, TYCV, TATV, NNNNGATT, NNAGAAW, or NAAAAC. Y is a pyrimidine; N is any nucleotide base; W is A or T.

[0165] A base editor provided herein can comprise a CRISPR protein-derived domain that is capable of binding a nucleotide sequence that contains a canonical or non-canonical protospacer adjacent motif (PAM) sequence.

[0166] In some embodiments, the PAM is an “NRN” PAM where the “N” in “NRN” is adenine (A), thymine (T), guanine (G), or cytosine (C), and the R is adenine (A) or guanine (G); or the PAM is an “NYN” PAM, wherein the “N” in NYN is adenine (A), thymine (T), guanine (G), or cytosine (C), and the Y is cytidine (C) or thymine (T), for example, as described in R. T. Walton et al., 2020, Science, 10.1126/science.aba8853 (2020), the entire contents of which are incorporated herein by reference.

[0167] Several PAM variants are described in Table 3 below.

TABLE 3
Cas9 proteins and corresponding PAM sequences.
N is A, C, T, or G; and V is A, C, or G.

| Variant | PAM |
|---|---|
| spCas9 | NGG |
| spCas9-VRQR | NGA |
| spCas9-VRER | NGCG |
| xCas9 (sp) | NGN |
| saCas9 | NNGRRT |
| saCas9-KKH | NNNRRT |
| spCas9-LRKIQK | NGTN |
| spCas9-LRVSQK | NGTN |
| spCas9-LRVSQL | NGTN |
| Cpf1 | 5′ (TTTV) |
| SpyMac | 5′-NAA-3′ |

[0168] In some embodiments, the PAM is NGC. In some embodiments, the NGC PAM is recognized by a Cas9 variant. In some embodiments, the Cas9 variant contains one or more amino acid substitutions selected from D1135V, G1218R, R1335Q, and T1337R (collectively termed VRQR) of spCas9 (SEQ ID No: 197), or a corresponding mutation in another Cas9. In some embodiments, the Cas9 variant contains one or more amino acid substitutions selected from D1135V, G1218R, R1335E, and T1337R (collectively termed VRER) of spCas9 (SEQ ID No: 197), or a corresponding mutation in another Cas9. In some embodiments, the Cas9 variant contains one or more amino acid substitutions selected from E782K, N968K, and R1015H (collectively termed KHH) of saCas9 (SEQ ID NO: 218).

[0169] In some cases, a Cas9 variant has specificity for the PAM 5′-NGC-3′. In some embodiments, a Cas9 variant includes one or more amino acid substitutions selected from D1135M, S1136Q, G1218K, E1219F, A1322R, D1332A, R1335E, and T1337K of spCas9 (SEQ ID No: 197), or a corresponding mutation in another Cas9. In some embodiments, a Cas9 variant includes one or more amino acid substitutions selected from D1135M, S1136Y, G1218K, E1219F, A1322R, D1332A, R1335E, and T1337K of spCas9 (SEQ ID No: 197), or a corresponding mutation in another Cas9. In some embodiments, the a Cas9 variant includes one or more amino acid substitutions selected from D1135L, S1136Y, G1218K, E1219F, A1322R, D1332A, R1335E, and T1337R of spCas9 (SEQ ID No: 197), or a corresponding mutation in another Cas9. In some embodiments, a Cas9 variant includes one or more amino acid substitutions selected from D1135M, S1136Y, G1218K, E1219F, A1322R, D1332A, R1335E, and T1337K of spCas9 (SEQ ID No: 197), or a corresponding mutation in another Cas9. In some embodiments, a Cas9 variant includes one or more amino acid substitutions selected from D1135L, S1136Y, G1218K, E1219F, A1283D, A1322R, D1332A, R1335E, and T1337K of spCas9 (SEQ ID No: 197), or a corresponding mutation in another Cas9. In some embodiments, a Cas9 variant includes one or more amino acid substitutions selected from D1135L, S1136Q, G1218K, E1219F, E1250K, A1283D, A1322R, D1332A, R1335E, and T1337K of spCas9 (SEQ ID No: 197), or a corresponding mutation in another Cas9. In some embodiments, a Cas9 variant includes one or more amino acid substitutions selected from D1135M, S1136Y, G1218K, E1219F, E1250K, A1283D, A1322R, D1332A, R1335E, and T1337R of spCas9 (SEQ ID No: 197), or a corresponding mutation in another Cas9. In some embodiments, a Cas9 variant includes one or more amino acid substitutions selected from R765A, Q768A, D1135L, S1136Y, G1218K, A1283D, E1219F, A1322R, D1332A, R1335E, and T1337K of spCas9 (SEQ ID No: 197), or a corresponding mutation in another Cas9. In some embodiments, any of the Cas9 proteins provided herein, including an SpCas9 comprises any one, two, three, four, five, six, seven, eight, nine, or ten of the following amino acid substitutions in a corresponding residue: R765A, Q768A, W1126R, R1359W, E1250K, A1239T, A1239V, A1283D, R1335D, D1135L, D1135M, D1135R, D1135W, S1136H, S1136Q, S1136Y, G1218D, G1218K, G1218R, G1218E, G1218L, E1219F, E1219K, E1219N, A1322A, A1322R, A1322K, D1332A, R1335V, T1337K, T1337T, D1332A, D1135V and T1337R.

[0170] In some embodiments, a CRISPR protein-derived domain of a base editor comprises all or a portion (e.g., a functional portion) of a Cas9 protein with a canonical PAM sequence (NGG). In other embodiments, a Cas9-derived domain of a base editor can employ a non-canonical PAM sequence. Such sequences have been described in the art and would be apparent to the skilled artisan. For example, Cas9 domains that bind non-canonical PAM sequences have been described in Kleinstiver, B. P., et al., “Engineered CRISPR-Cas9 nucleases with altered PAM specificities” Nature 523, 481-485 (2015); and Kleinstiver, B. P., et al., “Broadening the targeting range of Staphylococcus aureus CRISPR-Cas9 by modifying PAM recognition” Nature Biotechnology 33, 1293-1298 (2015); R. T. Walton et al. “Unconstrained genome targeting with near-PAMless engineered CRISPR-Cas9 variants” Science 10.1126/science.aba8853 (2020); Hu et al. “Evolved Cas9 variants with broad PAM compatibility and high DNA specificity,” Nature, 2018 Apr. 5, 556 (7699), 57-63; Miller et al., “Continuous evolution of SpCas9 variants compatible with non-G PAMs” Nat. Biotechnol., 2020 April; 38 (4): 471-481; the entire contents of each are hereby incorporated by reference.

Fusion Proteins or Complexes Comprising a NapDNAbp and a Cytidine Deaminase and/or Adenosine Deaminase

[0171] Some aspects of the disclosure provide fusion proteins or complexes comprising a Cas9 domain or other nucleic acid programmable DNA binding protein (e.g., Cas12) and one or more cytidine deaminase, adenosine deaminase, or cytidine adenosine deaminase domains. It should be appreciated that the Cas9 domain may be any of the Cas9 domains or Cas9 proteins (e.g., dCas9 or nCas9) provided herein. In some embodiments, any of the Cas9 domains or Cas9 proteins (e.g., dCas9 or nCas9) provided herein may be fused with any of the cytidine deaminases and/or adenosine deaminases provided herein. The domains of the base editors disclosed herein can be arranged in any order.

[0172] In some embodiments, the fusion proteins or complexes comprising a cytidine deaminase or adenosine deaminase and a napDNAbp (e.g., Cas9 or Cas12 domain) do not include a linker sequence. In some embodiments, a linker is present between the cytidine or adenosine deaminase and the napDNAbp. In some embodiments, cytidine or adenosine deaminase and the napDNAbp are fused via any of the linkers provided herein. For example, in some embodiments the cytidine or adenosine deaminase and the napDNAbp are fused via any of the linkers provided herein.

[0173] It should be appreciated that the fusion proteins or complexes of the present disclosure may comprise one or more additional features. For example, in some embodiments, the fusion protein or complex may comprise inhibitors, cytoplasmic localization sequences, export sequences, such as nuclear export sequences, or other localization sequences, as well as sequence tags that are useful for solubilization, purification, or detection of the fusion proteins or complexes. Suitable protein tags provided herein include, but are not limited to, biotin carboxylase carrier protein (BCCP) tags, myc-tags, calmodulin-tags, FLAG-tags, hemagglutinin (HA)-tags, polyhistidine tags, also referred to as histidine tags or His-tags, maltose binding protein (MBP)-tags, nus-tags, glutathione-S-transferase (GST)-tags, green fluorescent protein (GFP)-tags, thioredoxin-tags, S-tags, Softags (e.g., Softag 1, Softag 3), strep-tags, biotin ligase tags, FLASH tags, V5 tags, and SBP-tags. Additional suitable sequences will be apparent to those of skill in the art. In some embodiments, the fusion protein or complex comprises one or more His tags.

[0174] Exemplary, yet nonlimiting, fusion proteins are described in International PCT Application Nos. PCT/US2017/045381, PCT/US2019/044935, and PCT/US2020/016288, each of which is incorporated herein by reference for its entirety.

Fusion Proteins or Complexes with Internal Insertions

[0175] Provided herein are fusion proteins or complexes comprising a heterologous polypeptide fused to a nucleic acid programmable nucleic acid binding protein, for example, a napDNAbp. The heterologous polypeptide can be fused to the napDNAbp at a C-terminal end of the napDNAbp, an N-terminal end of the napDNAbp, or inserted at an internal location of the napDNAbp. In some embodiments, the heterologous polypeptide is a deaminase (e.g., cytidine or adenosine deaminase) or a functional fragment thereof. For example, a fusion protein can comprise a deaminase flanked by an N-terminal fragment and a C-terminal fragment of a Cas9 or Cas12 (e.g., Cas12b/C2c1), polypeptide.

[0176] The deaminase can be a circular permutant deaminase. In some embodiments, the deaminase is a circular permutant TadA, circularly permutated at amino acid residue 116, 136, or 65 as numbered in a TadA reference sequence.

[0177] The fusion protein or complexes can comprise more than one deaminase. The fusion protein or complex can comprise, for example, 1, 2, 3, 4, 5 or more deaminases. The deaminases in a fusion protein or complex can be adenosine deaminases, cytidine deaminases, or a combination thereof.

[0178] In some embodiments, the napDNAbp in the fusion protein or complex contains a Cas9 polypeptide or a fragment thereof. The Cas9 polypeptide can be a variant Cas9 polypeptide. The Cas9 polypeptide can be a circularly permuted Cas9 protein.

[0179] The heterologous polypeptide (e.g., deaminase) can be inserted in the napDNAbp (e.g., Cas9 or Cas12 (e.g., Cas12b/C2c1)) at a suitable location, for example, such that the napDNAbp retains its ability to bind the target polynucleotide and a guide nucleic acid. A deaminase (e.g., adenosine deaminase, cytidine deaminase, or adenosine deaminase and cytidine deaminase (dual deaminase)) can be inserted into a napDNAbp without compromising function of the deaminase (e.g., base editing activity) or the napDNAbp (e.g., ability to bind to target nucleic acid and guide nucleic acid).

[0180] In some embodiments, the deaminase (e.g., adenosine deaminase, cytidine deaminase, or adenosine deaminase and cytidine deaminase) is inserted in regions of the Cas9 polypeptide comprising higher than average B-factors (e.g., higher B factors compared to the total protein or the protein domain comprising the disordered region). Cas9 polypeptide positions comprising a higher than average B-factor can include, for example, residues 768, 792, 1052, 1015, 1022, 1026, 1029, 1067, 1040, 1054, 1068, 1246, 1247, and 1248 as numbered in SEQ ID NO: 197. Cas9 polypeptide regions comprising a higher than average B-factor can include, for example, residues 792-872, 792-906, and 2-791 as numbered in SEQ ID NO: 197.

[0181] In some embodiments, a heterologous polypeptide (e.g., deaminase) is inserted in a flexible loop of a Cas9 polypeptide. The flexible loop portions can be selected from the group consisting of 530-537, 569-570, 686-691, 943-947, 1002-1025, 1052-1077, 1232-1247, or 1298-1300 as numbered in SEQ ID NO: 197, or a corresponding amino acid residue in another Cas9 polypeptide. The flexible loop portions can be selected from the group consisting of: 1-529, 538-568, 580-685, 692-942, 948-1001, 1026-1051, 1078-1231, or 1248-1297 as numbered in SEQ ID NO: 197, or a corresponding amino acid residue in another Cas9 polypeptide.

[0182] A heterologous polypeptide (e.g., adenine deaminase) can be inserted into a Cas9 polypeptide region corresponding to amino acid residues: 1017-1069, 1242-1247, 1052-1056, 1060-1077, 1002-1003, 943-947, 530-537, 568-579, 686-691, 1242-1247, 1298-1300, 1066-1077, 1052-1056, or 1060-1077 as numbered in SEQ ID NO: 197, or a corresponding amino acid residue in another Cas9 polypeptide.

[0183] A heterologous polypeptide (e.g., adenine deaminase) can be inserted in place of a deleted region of a Cas9 polypeptide. The deleted region can correspond to an N-terminal or C-terminal portion of the Cas9 polypeptide. Exemplary internal fusions base editors are provided in Table 4A below:

TABLE 4A
Insertion loci in Cas9 proteins

| BE ID | Modification | Other ID |
|---|---|---|
| IBE001 | Cas9 TadA ins 1015 | ISLAY01 |
| IBE002 | Cas9 TadA ins 1022 | ISLAY02 |
| IBE003 | Cas9 TadA ins 1029 | ISLAY03 |
| IBE004 | Cas9 TadA ins 1040 | ISLAY04 |
| IBE005 | Cas9 TadA ins 1068 | ISLAY05 |
| IBE006 | Cas9 TadA ins 1247 | ISLAY06 |
| IBE007 | Cas9 TadA ins 1054 | ISLAY07 |
| IBE008 | Cas9 TadA ins 1026 | ISLAY08 |
| IBE009 | Cas9 TadA ins 768 | ISLAY09 |
| IBE020 | delta HNH TadA 792 | ISLAY20 |
| IBE021 | N-term fusion single TadA helix truncated 165-end | ISLAY21 |
| IBE029 | TadA-Circular Permutant116 ins1067 | ISLAY29 |
| IBE031 | TadA-Circular Permutant 136 ins1248 | ISLAY31 |
| IBE032 | TadA-Circular Permutant 136ins 1052 | ISLAY32 |
| IBE035 | delta 792-872 TadA ins | ISLAY35 |
| IBE036 | delta 792-906 TadA ins | ISLAY36 |
| IBE043 | TadA-Circular Permutant 65 ins1246 | ISLAY43 |
| IBE044 | TadA ins C-term truncate2 791 | ISLAY44 |

[0184] A heterologous polypeptide (e.g., deaminase) can be inserted within a structural or functional domain of a Cas9 polypeptide. A heterologous polypeptide (e.g., deaminase) can be inserted between two structural or functional domains of a Cas9 polypeptide. A heterologous polypeptide (e.g., deaminase) can be inserted in place of a structural or functional domain of a Cas9 polypeptide, for example, after deleting the domain from the Cas9 polypeptide. The structural or functional domains of a Cas9 polypeptide can include, for example, RuvC I, RuvC II, RuvC III, Rec1, Rec2, PI, or HNH.

[0185] A fusion protein can comprise a linker between the deaminase and the napDNAbp polypeptide. The linker can be a peptide or a non-peptide linker. For example, the linker can be an XTEN, (GGGS)ₙ (SEQ ID NO: 246), SGGSSGGS (SEQ ID NO: 330), (GGGGS)ₙ (SEQ ID NO: 247), (G)ₙ, (EAAAK)ₙ (SEQ ID NO: 248), (GGS)ₙ, SGSETPGTSESATPES (SEQ ID NO: 249). In some embodiments, the fusion protein comprises a linker between the N-terminal Cas9 fragment and the deaminase. In some embodiments, the fusion protein comprises a linker between the C-terminal Cas9 fragment and the deaminase. In some embodiments, the N-terminal and C-terminal fragments of napDNAbp are connected to the deaminase with a linker. In some embodiments, the N-terminal and C-terminal fragments are joined to the deaminase domain without a linker. In some embodiments, the fusion protein comprises a linker between the N-terminal Cas9 fragment and the deaminase but does not comprise a linker between the C-terminal Cas9 fragment and the deaminase. In some embodiments, the fusion protein comprises a linker between the C-terminal Cas9 fragment and the deaminase but does not comprise a linker between the N-terminal Cas9 fragment and the deaminase.

[0186] In some embodiments, the napDNAbp in the fusion protein or complex is a Cas12 polypeptide, e.g., Cas12b/C2c1, or a functional fragment thereof capable of associating with a nucleic acid (e.g., a gRNA) that guides the Cas 12 to a specific nucleic acid sequence. The Cas12 polypeptide can be a variant Cas12 polypeptide. In other embodiments, the N- or C-terminal fragments of the Cas12 polypeptide comprise a nucleic acid programmable DNA binding domain or a RuvC domain. In other embodiments, the fusion protein contains a linker between the Cas12 polypeptide and the catalytic domain. In other embodiments, the amino acid sequence of the linker is GGSGGS (SEQ ID NO: 250) or GSSGSETPGTSESATPESSG (SEQ ID NO: 251). In other embodiments, the linker is a rigid linker. In other embodiments of the above aspects, the linker is encoded by GGAGGCTCTGGAGGAAGC (SEQ ID NO: 252) or GGCTCTTCTGGATCTGAAACACCTGGCACAAGCGAGAGCGCCACCCCTGAGAGCTCTGGC (SEQ ID NO: 253).

[0187] In other embodiments, the fusion protein or complex contains a nuclear localization signal (e.g., a bipartite nuclear localization signal). In other embodiments, the amino acid sequence of the nuclear localization signal is MAPKKKRKVGIHGVPAA (SEQ ID NO: 261). In other embodiments of the above aspects, the nuclear localization signal is encoded by the following sequence:

[0188] ATGGCCCCAAAGAAGAAGCGGAAGGTCGGTATCCACGGAGTCCCAGCAGCC (SEQ ID NO: 262). In other embodiments, the Cas12b polypeptide contains a mutation that silences the catalytic activity of a RuvC domain. In other embodiments, the Cas12b polypeptide contains D574A, D829A and/or D952A mutations.

[0189] In some embodiments, the fusion protein or complex comprises a napDNAbp domain (e.g., Cas12-derived domain) with an internally fused nucleobase editing domain (e.g., all or a portion (e.g., a functional portion) of a deaminase domain, e.g., an adenosine deaminase domain). In some embodiments, the napDNAbp is a Cas12b. In some embodiments, the base editor comprises a BhCas12b domain with an internally fused TadA*8 domain inserted at the loci provided in Table 4B below.

TABLE 4B
Insertion loci in Cas12b proteins

| | Insertion site | Inserted between aa |
|---|---|---|
| BhCas12b | | |
| position 1 | 153 | PS |
| position 2 | 255 | KE |
| position 3 | 306 | DE |
| position 4 | 980 | DG |
| position 5 | 1019 | KL |
| position 6 | 534 | FP |
| position 7 | 604 | KG |
| position 8 | 344 | HF |
| BvCas12b | | |
| position 1 | 147 | PD |
| position 2 | 248 | GG |
| position 3 | 299 | PE |
| position 4 | 991 | GE |
| position 5 | 1031 | KM |
| AaCas12b | | |
| position 1 | 157 | PG |
| position 2 | 258 | VG |
| position 3 | 310 | DP |
| position 4 | 1008 | GE |
| position 5 | 1044 | GK |

[0190] In some embodiments, the base editing system described herein is an ABE with TadA inserted into a Cas9. Polypeptide sequences of relevant ABEs with TadA inserted into a Cas9 are provided in the attached Sequence Listing as SEQ ID NOs: 263-308.

[0191] Exemplary, yet nonlimiting, fusion proteins are described in International PCT Application Nos. PCT/US2020/016285 and U.S. Provisional Application Nos. 62/852,228 and 62/852,224, the contents of which are incorporated by reference herein in their entireties.

### A to G Editing

[0192] In some embodiments, a base editor described herein comprises an adenosine deaminase domain. Such an adenosine deaminase domain of a base editor can facilitate the editing of an adenine (A) nucleobase to a guanine (G) nucleobase by deaminating the A to form inosine (I), which exhibits base pairing properties of G. In some embodiments, an A-to-G base editor further comprises an inhibitor of inosine base excision repair, for example, a uracil glycosylase inhibitor (UGI) domain or a catalytically inactive inosine specific nuclease. Without wishing to be bound by any particular theory, the UGI domain or catalytically inactive inosine specific nuclease can inhibit or prevent base excision repair of a deaminated adenosine residue (e.g., inosine), which can improve the activity or efficiency of the base editor.

[0193] A base editor comprising an adenosine deaminase can act on any polynucleotide, including DNA, RNA and DNA-RNA hybrids. In an embodiment an adenosine deaminase domain of a base editor comprises all or a portion (e.g., a functional portion) of an ADAT comprising one or more mutations which permit the ADAT to deaminate a target A in DNA. For example, the base editor can comprise all or a portion (e.g., a functional portion) of an ADAT from Escherichia coli (EcTadA) comprising one or more of the following mutations: D108N, A106V, D147Y, E155V, L84F, H123Y, I156F, or a corresponding mutation in another adenosine deaminase. Exemplary ADAT homolog polypeptide sequences are provided in the Sequence Listing as SEQ ID NOs: 1 and 309-315.

[0194] The adenosine deaminase can be derived from any suitable organism (e.g., E. coli). In some embodiments, the adenosine deaminase is from Escherichia coli, Staphylococcus aureus, Salmonella typhi, Shewanella putrefaciens, Haemophilus influenzae, Caulobacter crescentus, or Bacillus subtilis. In some embodiments, the adenine deaminase is a naturally-occurring adenosine deaminase that includes one or more mutations corresponding to any of the mutations provided herein (e.g., mutations in ecTadA). The corresponding residue in any homologous protein can be identified by e.g., sequence alignment and determination of homologous residues. The mutations in any naturally-occurring adenosine deaminase (e.g., having homology to ecTadA) that correspond to any of the mutations described herein (e.g., any of the mutations identified in ecTadA) can be generated accordingly.

[0195] In some embodiments, the adenosine deaminase comprises an amino acid sequence that is at least 60%, at least 65%, at least 70%, at least 75%, at least 80%, at least 85%, at least 90%, at least 95%, at least 96%, at least 97%, at least 98%, at least 99%, or at least 99.5% identical to any one of the amino acid sequences set forth in any of the adenosine deaminases provided herein. It should be appreciated that adenosine deaminases provided herein may include one or more mutations (e.g., any of the mutations provided herein). The disclosure provides any deaminase domains with a certain percent identify plus any of the mutations or combinations thereof described herein. In some embodiments, the adenosine deaminase comprises an amino acid sequence that has 1, 2, 3, 4, 5, 6, 7, 8, 9, 10, 11, 12, 13, 14, 15, 16, 17, 18, 19, 20, 21, 22, 21, 24, 25, 26, 27, 28, 29, 30, 31, 32, 33, 34, 35, 36, 37, 38, 39, 40, 41, 42, 43, 44, 45, 46, 47, 48, 49, 50, or more mutations compared to a reference sequence, or any of the adenosine deaminases provided herein.

[0196] It should be appreciated that any of the mutations provided herein (e.g., based on a TadA reference sequence, such as TadA*7.10 (SEQ ID NO: 1)) can be introduced into other adenosine deaminases, such as E. coli TadA (ecTadA), S. aureus TadA (saTadA), or other adenosine deaminases (e.g., bacterial adenosine deaminases). In some embodiments, the TadA reference sequence is TadA*7.10 (SEQ ID NO: 1). It would be apparent to the skilled artisan that additional deaminases may similarly be aligned to identify homologous amino acid residues that can be mutated as provided herein. Thus, any of the mutations identified in a TadA reference 5 sequence can be made in other adenosine deaminases (e.g., ecTada) that have homologous amino acid residues. It should also be appreciated that any of the mutations provided herein can be made individually or in any combination in a TadA reference sequence or another adenosine deaminase.

[0197] In some embodiments, the adenosine deaminase comprises an alteration or set of alterations selected from those listed in Tables 5A-5E below:

TABLE 5A
Adenosine Deaminase Variants. Residue positions in the E. coli TadA variant (TadA*) are indicated.

| | 23 | 26 | 36 | 37 | 48 | 49 | 51 | 72 | 84 | 87 | 106 | 108 | 123 | 125 | 142 | 146 | 147 | 152 | 155 | 156 | 157 | 161 |
|---|---|---|---|---|---|---|---|---|---|---|---|---|---|---|---|---|---|---|---|---|---|---|
| TadA*0.1 | W | R | H | N | P | | R | N | L | S | A | D | H | G | A | S | D | R | E | I | K | K |
| TadA*0.2 | W | R | H | N | P | | R | N | L | S | A | D | H | G | A | S | D | R | E | I | K | K |
| TadA*1.1 | W | R | H | N | P | | R | N | L | S | A | N | H | G | A | S | D | R | E | I | K | K |
| TadA*1.2 | W | R | H | N | P | | R | N | L | S | V | N | H | G | A | S | D | R | E | I | K | K |
| TadA*2.1 | W | R | H | N | P | | R | N | L | S | V | N | H | G | A | S | Y | R | V | I | K | K |
| TadA*2.2 | W | R | H | N | P | | R | N | L | S | V | N | H | G | A | S | Y | R | V | I | K | K |
| TadA*2.3 | W | R | H | N | P | | R | N | L | S | V | N | H | G | A | S | Y | R | V | I | K | K |
| TadA*2.4 | W | R | H | N | P | | R | N | L | S | V | N | H | G | A | S | Y | R | V | I | K | K |
| TadA*2.5 | W | R | H | N | P | | R | N | L | S | V | N | H | G | A | S | Y | R | V | I | K | K |
| TadA*2.6 | W | R | H | N | P | | R | N | L | S | V | N | H | G | A | S | Y | R | V | I | K | K |
| TadA*2.7 | W | R | H | N | P | | R | N | L | S | V | N | H | G | A | S | Y | R | V | T | K | K |
| TadA*2.8 | W | R | H | N | P | | R | N | L | S | V | N | H | G | A | S | Y | R | V | I | K | K |
| TadA*2.9 | W | R | H | N | P | | R | N | L | S | V | N | H | G | A | S | Y | R | V | I | K | K |
| TadA*2.10 | W | R | H | N | P | | R | N | L | S | V | N | H | G | A | S | Y | R | V | I | K | K |
| TadA*2.11 | W | R | H | N | P | | R | N | L | S | V | N | H | G | A | S | Y | R | V | I | K | K |
| TadA*2.12 | W | R | H | N | P | | R | N | L | S | V | N | H | G | A | S | Y | R | V | I | K | K |
| TadA*3.1 | W | R | H | N | P | | R | N | F | S | V | N | Y | G | A | S | Y | R | V | F | K | K |
| TadA*3.2 | W | R | H | N | P | | R | N | F | S | V | N | Y | G | A | S | Y | R | V | F | K | K |
| TadA*3.3 | W | R | H | N | P | | R | N | F | S | V | N | Y | G | A | S | Y | R | V | F | K | K |
| TadA*3.4 | W | R | H | N | P | | R | N | F | S | V | N | Y | G | A | S | Y | R | V | F | K | K |
| TadA*3.5 | W | R | H | N | P | | R | N | F | S | V | N | Y | G | A | S | Y | R | V | F | K | K |
| TadA*3.6 | W | R | H | N | P | | R | N | F | S | V | N | Y | G | A | S | Y | R | V | F | K | K |
| TadA*3.7 | W | R | H | N | P | | R | N | F | S | V | N | Y | G | A | S | Y | R | V | F | K | K |
| TadA*3.8 | W | R | H | N | P | | R | N | F | S | V | N | Y | G | A | S | Y | R | V | F | K | K |
| TadA*4.1 | W | R | H | N | P | | R | N | L | S | V | N | H | G | N | S | Y | R | V | I | K | K |
| TadA*4.2 | W | G | H | N | P | | R | N | L | S | V | N | H | G | N | S | Y | R | V | I | K | K |
| TadA*4.3 | W | R | H | N | P | | R | N | F | S | V | N | Y | G | N | S | Y | R | V | F | K | K |
| TadA*5.1 | W | R | L | N | P | | L | N | F | S | V | N | Y | G | A | C | Y | R | V | F | N | K |
| TadA*5.2 | W | R | H | S | P | | R | N | F | S | V | N | Y | G | A | S | Y | R | V | F | K | T |
| TadA*5.3 | W | R | L | N | P | | L | N | I | S | V | N | Y | G | A | C | Y | R | V | F | N | K |
| TadA*5.4 | W | R | H | S | P | | R | N | F | S | V | N | Y | G | A | S | Y | R | V | F | K | T |
| TadA*5.5 | W | R | L | N | P | | L | N | F | S | V | N | Y | G | A | C | Y | R | V | F | N | K |
| TadA*5.6 | W | R | L | N | P | | L | N | F | S | V | N | Y | G | A | C | Y | R | V | F | N | K |
| TadA*5.7 | W | R | L | N | P | | L | N | F | S | V | N | Y | G | A | C | Y | R | V | F | N | K |
| TadA*5.8 | W | R | L | N | P | | L | N | F | S | V | N | Y | G | A | C | Y | R | V | F | N | K |
| TadA*5.9 | W | R | L | N | P | | L | N | F | S | V | N | Y | G | A | C | Y | R | V | F | N | K |
| TadA*5.10 | W | R | L | N | P | | L | N | F | S | V | N | Y | G | A | C | Y | R | V | F | N | K |
| TadA*5.11 | W | R | L | N | P | | L | N | F | S | V | N | Y | G | A | C | Y | R | V | F | N | K |
| TadA*5.12 | W | R | L | N | P | | L | N | F | S | V | N | Y | G | A | C | Y | R | V | F | N | K |
| TadA*5.13 | W | R | H | N | P | | L | D | F | S | V | N | Y | A | A | S | Y | R | V | F | K | K |
| TadA*5.14 | W | R | H | N | S | | L | N | F | C | V | N | Y | G | A | S | Y | R | V | F | K | K |
| TadA*6.1 | W | R | H | N | S | | L | N | F | S | V | N | Y | G | N | S | Y | R | V | F | K | K |
| TadA*6.2 | W | R | H | N | T | V | L | N | F | S | V | N | Y | G | N | S | Y | R | V | F | N | K |
| TadA*6.3 | W | R | L | N | S | | L | N | F | S | V | N | Y | G | A | C | Y | R | V | F | N | K |
| TadA*6.4 | W | R | L | N | S | | L | N | F | S | V | N | Y | G | N | C | Y | R | V | F | N | K |
| TadA*6.5 | W | R | L | N | T | V | L | N | F | S | V | N | Y | G | A | C | Y | R | V | F | N | K |
| TadA*6.6 | W | R | L | N | T | V | L | N | F | S | V | N | Y | G | N | C | Y | R | V | F | N | K |
| TadA*7.1 | W | R | L | N | A | | L | N | F | S | V | N | Y | G | A | C | Y | R | V | F | N | K |
| TadA*7.2 | W | R | L | N | A | | L | N | F | S | V | N | Y | G | N | C | Y | R | V | F | N | K |
| TadA*7.3 | L | R | L | N | A | | L | N | F | S | V | N | Y | G | A | C | Y | R | V | F | N | K |
| TadA*7.4 | R | R | L | N | A | | L | N | F | S | V | N | Y | G | A | C | Y | R | V | F | N | K |
| TadA*7.5 | W | R | L | N | A | | L | N | F | S | V | N | Y | G | A | C | Y | H | V | F | N | K |
| TadA*7.6 | W | R | L | N | A | | L | N | I | S | V | N | Y | G | A | C | Y | P | V | F | N | K |
| TadA*7.7 | L | R | L | N | A | | L | N | F | S | V | N | Y | G | A | C | Y | P | V | F | N | K |
| TadA*7.8 | L | R | L | N | A | | L | N | F | S | V | N | Y | G | N | C | Y | R | V | F | N | K |
| TadA*7.9 | L | R | L | N | A | | L | N | F | S | V | N | Y | G | N | C | Y | P | V | F | N | K |
| TadA*7.10 | R | R | L | N | A | | L | N | F | S | V | N | Y | G | A | C | Y | P | V | F | N | K |

TABLE 5B
TadA*8 Adenosine Deaminase Variants. Residue positions in the E. coli TadA variant
(TadA*) are indicated. Alterations are referenced to TadA*7.10 (first row).

| | 23 | 36 | 48 | 51 | 76 | 82 | 84 | 106 | 108 | 123 | 146 | 147 | 152 | 154 | 155 | 156 | 157 | 166 |
|---|---|---|---|---|---|---|---|---|---|---|---|---|---|---|---|---|---|---|
| TadA*7.10 | R | L | A | L | I | V | F | V | N | Y | C | Y | P | Q | V | F | N | T |
| TadA*8.1 | | | | | | | | | | | | T | | | | | | |
| TadA*8.2 | | | | | | | | | | | | R | | | | | | |
| TadA*8.3 | | | | | | | | | | | | | | S | | | | |
| TadA*8.4 | | | | | | | | | | H | | | | | | | | |
| TadA*8.5 | | | | | | S | | | | | | | | | | | | |
| TadA*8.6 | | | | | | | | | | | | | | | | | | R |
| TadA*8.7 | | | | | | | | | | | | | | R | | | | |
| TadA*8.8 | | | | | | | | | | H | | R | | R | | | | |
| TadA*8.9 | | | | | Y | | | | | | | R | | R | | | | |
| TadA*8.10 | | | | | | | | | | | | R | | R | | | | R |
| TadA*8.11 | | | | | | | | | | | | T | | R | | | | |
| TadA*8.12 | | | | | | | | | | | | T | | S | | | | |
| TadA*8.13 | | | | | Y | | | | | H | | R | | R | | | | |
| TadA*8.14 | | | | | Y | S | | | | | | | | | | | | |
| TadA*8.15 | | | | | | S | | | | | | R | | | | | | |
| TadA*8.16 | | | | | | S | | | | H | | R | | | | | | |
| TadA*8.17 | | | | | | S | | | | | | | | R | | | | |
| TadA*8.18 | | | | | | S | | | | H | | | | R | | | | |
| TadA*8.19 | | | | | | S | | | | H | | R | | R | | | | |
| TadA*8.20 | | | | | Y | S | | | | H | | R | | R | | | | |
| TadA*8.21 | | | | | | | | | | | | R | | S | | | | |
| TadA*8.22 | | | | | | S | | | | | | | | S | | | | |
| TadA*8.23 | | | | | | S | | | | H | | | | | | | | |
| TadA*8.24 | | | | | | S | | | | H | | T | | | | | | |

TABLE 5C
TadA*9 Adenosine Deaminase Variants.

| TadA*9 Description | Alterations |
|---|---|
| TadA*9.1 | E25F, V82S, Y123H, T133K, Y147R, Q154R |
| TadA*9.2 | E25F, V82S, Y123H, Y147R, Q154R |
| TadA*9.3 | V82S, Y123H, P124W, Y147R, Q154R |
| TadA*9.4 | L51W, V82S, Y123H, C146R, Y147R, Q154R |
| TadA*9.5 | P54C, V82S, Y123H, Y147R, Q154R |
| TadA*9.6 | Y73S, V82S, Y123H, Y147R, Q154R |
| TadA*9.7 | N38G, V82T, Y123H, Y147R, Q154R |
| TadA*9.8 | R23H, V82S, Y123H, Y147R, Q154R |
| TadA*9.9 | R21N, V82S, Y123H, Y147R, Q154R |
| TadA*9.10 | V82S, Y123H, Y147R, Q154R, A158K |
| TadA*9.11 | N72K, V82S, Y123H, D139L, Y147R, Q154R, |
| TadA*9.12 | E25F, V82S, Y123H, D139M, Y147R, Q154R |
| TadA*9.13 | M70V, V82S, M94V, Y123H, Y147R, Q154R |
| TadA*9.14 | Q71M, V82S, Y123H, Y147R, Q154R |
| TadA*9.15 | E25F, V82S, Y123H, T133K, Y147R, Q154R |
| TadA*9.16 | E25F, V82S, Y123H, Y147R, Q154R |
| TadA*9.17 | V82S, Y123H, P124W, Y147R, Q154R |
| TadA*9.18 | L51W, V82S, Y123H, C146R, Y147R, Q154R |
| TadA*9.19 | P54C, V82S, Y123H, Y147R, Q154R |
| TadA*9.2 | Y73S, V82S, Y123H, Y147R, Q154R |
| TadA*9.21 | N38G, V82T, Y123H, Y147R, Q154R |
| TadA*9.22 | R23H, V82S, Y123H, Y147R, Q154R |
| TadA*9.23 | R21N, V82S, Y123H, Y147R, Q154R |
| TadA*9.24 | V82S, Y123H, Y147R, Q154R, A158K |
| TadA*9.25 | N72K, V82S, Y123H, D139L, Y147R, Q154R, |
| TadA*9.26 | E25F, V82S, Y123H, D139M, Y147R, Q154R |
| TadA*9.27 | M70V, V82S, M94V, Y123H, Y147R, Q154R |
| TadA*9.28 | Q71M, V82S, Y123H, Y147R, Q154R |
| TadA*9.29 | E25F, I76Y, V82S, Y123H, Y147R, Q154R |
| TadA*9.30 | I76Y, V82T, Y123H, Y147R, Q154R |
| TadA*9.31 | N38G, I76Y, V82S, Y123H, Y147R, Q154R |
| TadA*9.32 | N38G, I76Y, V82T, Y123H, Y147R, Q154R |
| TadA*9.33 | R23H, I76Y, V82S, Y123H, Y147R, Q154R |
| TadA*9.34 | P54C, I76Y, V82S, Y123H, Y147R, Q154R |
| TadA*9.35 | R21N, I76Y, V82S, Y123H, Y147R, Q154R |
| TadA*9.36 | I76Y, V82S, Y123H, D138M, Y147R, Q154R |
| TadA*9.37 | Y72S, I76Y, V82S, Y123H, Y147R, Q154R |
| TadA*9.38 | E25F, I76Y, V82S, Y123H, Y147R, Q154R |
| TadA*9.39 | I76Y, V82T, Y123H, Y147R, Q154R |
| TadA*9.40 | N38G, I76Y, V82S, Y123H, Y147R, Q154R |
| TadA*9.41 | N38G, I76Y, V82T, Y123H, Y147R, Q154R |
| TadA*9.42 | R23H, I76Y, V82S, Y123H, Y147R, Q154R |
| TadA*9.43 | P54C, I76Y, V82S, Y123H, Y147R, Q154R |
| TadA*9.44 | R21N, I76Y, V82S, Y123H, Y147R, Q154R |
| TadA*9.45 | I76Y, V82S, Y123H, D138M, Y147R, Q154R |
| TadA*9.46 | Y72S, I76Y, V82S, Y123H, Y147R, Q154R |
| TadA*9.47 | N72K, V82S, Y123H, Y147R, Q154R |
| TadA*9.48 | Q71M, V82S, Y123H, Y147R, Q154R |
| TadA*9.49 | M70V, V82S, M94V, Y123H, Y147R, Q154R |
| TadA*9.50 | V82S, Y123H, T133K, Y147R, Q154R |
| TadA*9.51 | V82S, Y123H, T133K, Y147R, Q154R, A158K |
| TadA*9.52 | M70V, Q71M, N72K, V82S, Y123H, Y147R, Q154R |
| TadA*9.53 | N72K, V82S, Y123H, Y147R, Q154R |
| TadA*9.54 | Q71M, V82S, Y123H, Y147R, Q154R |
| TadA*9.55 | M70V, V82S, M94V, Y123H, Y147R, Q154R |
| TadA*9.56 | V82S, Y123H, T133K, Y147R, Q154R |
| TadA*9.57 | V82S, Y123H, T133K, Y147R, Q154R, A158K |
| TadA*9.58 | M70V, Q71M, N72K, V82S, Y123H, Y147R, Q154R |

Alterations are referenced to TadA*7.10. Additional details of TadA*9 adenosine deaminases are described in International PCT Application No. PCT/US2020/049975, which is incorporated herein by reference in its entirety for all purposes.

[0198] In some embodiments, the adenosine deaminase comprises a TadA*8.20 adenosine deaminase variant further comprising an F149Y amino acid alteration. In some embodiments, the adenosine deaminase comprises a TadA*8.20 adenosine deaminase variant further comprising the amino acid alterations R147D, F149Y, T166I, and D167N (TadA*8.10+). In some embodiments, the adenosine deaminase comprises a TadA*8.20 adenosine deaminase variant further comprising the amino acid alterations S82T and F149Y (TadA*9v1). In some embodiments, the adenosine deaminase comprises a TadA*8.20 adenosine deaminase variant further comprising the amino acid alterations Y147D, F149Y, T166I, D167N and S82T (TadA*9v2).

[0199] In some embodiments, the adenosine deaminase comprises one or more of M1I, M1S, S2A, S2E, S2H, S2R, S2L, E3L, V4D, V4E, V4M, V4K, V4S, V4T, V4A, E5K, F6S, F6G, F6H, F6Y, F6I, F6E, S7K, H8E, H8Y, H8H, H8Q, H8E, H8G, H8S, E9Y, E9K, E9V, E9E, Y10F, Y10W, Y10Y, M12S, M12L, M12R, M12W, R13H, R13I, R13Y, R13R, R13G, R13S, H14N, A15D, A15V, A15L, A15H, T17T, T17A, T17W, T17L, T17F, T17R, T17S, L18A, L18E, L18N, L18L, L18S, A19N, A19H, A19K, A19A, A19D, A19G, A19M, R21N, K20K, K20A, K20R, K20E, K20G, K20C, K20Q R21A, R21R, R21N, R21Y, R21C G22P, A22W, A22R, W23D, R23H, W23G, W23Q, W23L, W23R, W23H W23D W23M, W23W, W23I, D24E, D24G, D24W, D24D, D24R, E25F, E25M, E25D, E25A, E25G, E25R, E25E, E25H E25V, E25S, E25Y, R26D, R26E, R26G, R26N, R26Q, R26C, R26L, R26K, R26W, R26C, R26P, R26R, R26A, R26H, E27E, E27Q, E27H, E27C, E27G, E27K, E27S, E27P, E27R, E27L, E27V, E27D, V28V, V28A, V28C, V28G, V28P, V28S, V28T, P29V, P29P, P29A, P29G, P29K, P29L, V30V, V30I, V30L, V30F, V30G, V30A, V30M, L34S, L34V, L34L, L34M, L34W, L34G, H36E, H36V, L36H, H36L, H36N, N37N, N37H, N37R, N37T, N37S, N38G, N38R, N38N, N38E, V40I, W45A, W45W, W45R, W45L, W45N, N46N, N46M, N46P, N46G, N46L, N46R, N46V, R46W, R46F, R46Q, R46M, R47A, R47Q, R47F, R47K, R47P, R47W, R47M, R47R, R47G, R47S, R47V, R47H, P48T, P48L, P48A, P48I, P48S, P48R, P48K, P48D, P48E, P48H, P48G, P48P, P48N, I49G, I49H, I49V, I49F, I49H, I49I, I49M, I49N, I49K, I49Q, I49T, G50L, G50S, G50R, G50G, R51H, R51L, R51N, L51W, R51Y, R51G, R51V, R51R, H52D, H52Y, H521, H52H, D53D, D53E, D53G, D53P, P54C, P54T, P54P, P54E, A55H, T55A, T55I, T55V, T55G, T55T, A56A, A56H, A56W, A56E, A56S, H57P, H57A, H57H, H57N, A58G, A58E, A58A, A58R, E59A, E59G, E59I, E59Q, E59W, E59E, E59T, E59H, E59P, M61A, M61I, M61L, M61V, M61P, M61G, M61I, L63S, L63V, L63T, L63R, L63H, L63A, R64A, R64Q, R64R, R64D, Q65V, Q65H, Q65G, Q65P, Q65F, Q65Q, Q65R, G66V, G66E, G66T, G66G, G66C, G67G, G67W, G67I, G67A, G67D, G67L, G67V, L68Q, L68M, L68V, L68H, L68L, L68G, V69A, V69M, V69V, M70V, M70L, E70A, M70A, M70M, M70E, M70T, M70v, Q71M, Q71N, Q71L, Q71R, Q71Q, Q71I, N72A, N72K, N72S, N72D, N72Y, N72N, N72H, N72G, N72M, Y73G, Y73I, Y73K, Y73R, Y73S, Y73Y, Y73H, Y73A, R74A, R74Q, R74G, R74K, R74L, R74N, R74G, R74K, R74R, I76H, I76R, I76W, I76Y, I76V, I76Q, I76L, I76D, I76F, I76I, I76N, I76T, I76Y, D77G, D77D, D77A, D77Q, A78Y, A78T, A78G, A78A, A78I, T79M, T79R, T79L, T79T, L80M, L80Y, L80I, L80V, L80L, Y81D, Y81V, Y81Y, Y81M, V82A, V82S, V82G, V82T, V82V, V82Q, V82Y, T83L, T83F, T83T, T83N, L84E, L84F, L84Y, L84I, L84L, L84M, L84A, L84T, L84S, E85K, E85G, E85P, E85S, E85E, E85F, E85V, E85R, P86T, P86C, P86P, P86L, P86N, P86K, P86H, C87M, C87I, C87S, C87N, C87P, S87C, S87L, S87V, V88A, V88M, V88V, V88T, V88E, V88D, V88S, C90S, C90P, C90A, C90T, C90M, A91A, A91G, A91S, A91V, A91T, A91C, A91L, G92T, G92M, G92A, G92Y, G92G, A93I, A93C, A93M, A93V, A93A, M94M, M94T, M94A, M94V, M94L, M94I, M94H, 195S, 195G, 195L, 195H, 195V, H96A, H96L, H96R, H96S, H96H, H96N, H96E, S97C, S97G, S97I, S97M, S97R, S97S, S97P, R98K, R981, R98N, R98Q, R98G, R98H, R98C, R98L, R98R, G100R, G100V, G100K, G100A, G100S, G100M, G100I, R101V, R101R, R101S, R101C, V102A, V102F, V102I, V102V, D103A, V103A, V103G, V103F, V103V, F104G, D104N, F104V, F104I, F104L, F104A, F104F, F104R, G105V, G105W, G105G, G105M, G105A, A106T, V106Q, V106F, V106W, V106M, A106A, A106Q, A106F, A106G, A106W, A106M, A106V, A106R, A106L, A106S, A106B, A106I, R107C, R107G, R107P, R107K, R107A, R107N, R107W, R107H, R107S, R107R, R107F, D108N, D108F, D108G, D108V, D108A, D108Y, D108H, D108I, D108K, D108L, D108M, D108Q, N108Q, N108F, N108W, N108M, N108K, D108K, D108F, D108M, D108Q, D108R, D108W, D108S, D108E, D108T, D108R, D108D, A109H, A109K, A109R, A109S, A109T, A109V, A109A, A109D, K110G, K110H, K110I, K110R, K110T, K110K, K110A, K110I, T111A, T111G, T111H, T111R, T111T, T111K, G112A, G112G, G112H, G112T, G112R, A113N, A114G, A114H, A114V, A114C, A114S, A114A, G115S, G115G, G115M, G115L, G115A, G115F, L117M, L117L, L117W, L117A, L117S, L117N, L117V, M118D, M118G, M118K, M118N, M118V, M118M, M118L, M118R, D119L, D119N, D119S, D119V, D119D, V120H, V120L, V120V, V120T, V120A, V120E, V120G, V120D, L121D, L121M, L121N, L121K, L121L, H122H, H122N, H122P, H122R, H122S, H122Y, H122G, H122T, H122L, H123C, H123G, H123P, H123V, H123Y, Y123H, H123Y, H123H, P124P, P124H, P124A, P124Y, P124D, P124G, P124I, P124L, P124W, G125H, G125I, G125A, G125M, G125K, G125G, G125P, M126D, M126H, M126K, M126I, M126N, M1260, M126S, M126Y, M126M, M126G, N127H, N127S, N127D, N127K, N127R, N127N, N127I, N127P, N127M, H128R, H128N, H128L, H128H, R129H, R129Q, R129V, R129I, R129E, R129V, R129R, R129M, R129P, V130R, V130V, V130E, V130D, E131E, E131I, E131V, E131K, I132I, I132F, I132T, I132L, I132V, I132E, T133V, T133E, T133G, T133K, T133T, T133A, T133H, T133F, T133I, E134A, E134E, E134G, E134I, E134H, E134K, E134T, G135G, G135V, G135I, G135P, G135E, I136G, I136L, I136T, I136I, 1137A, 1137D, 1137E, L137M, 1137S, L137L, L1371, A138D, A138E, A138G, S138A, A138N, A138S, A138T, A138V, A138Y, A138A, A138M, A138L, D139E, D139I, D139C, D139L, D139M, D139D, D139G, D139H, D139A, E140A, E140C, E140L, E140R, E140K, E140E, E140D, C141S, C141A, C141C, C141V, C141E, A142N, A142D, A142G, A142A, A142L, A142S, A142T, A142N, A142S, A142V, A142E, A142C, A143D, A143E, A143G, A143D, A143G, A143E, A143L, A143W, A143M, A143S, A143Q, A143R, A143A, A143I, L144S, L144L, L144T, L144A, L145A, L145F, L145G, L145D, L145L, L145C, L145E, L145s, C146R, S146A, S146C, S146D, S146F, S146R, S146T, S146D, S146G, S146S, S146L, D147D, D147L, D147F, D147G, D147Y, Y147T, Y147R, Y147D, D147R, D147Y, D147A, D147T, D147H, D147F, D147U, D147V, D1471, D147C, F148L, F148F, F148R, F148Y, F148A, F148T, F149C, F149M, F149R, F149Y, F149N, F149F, F149A, F149T, F149V R150R, R150M, R150D, R150F, M151F, M151P, M151R, M151V, M151M, M151E, R152C, R152F, R152H, R152P, R152R, R152P, R152Q, R152M, R1520, R153C, R153Q, R153R, R153V, R153E, R153A, R153P, Q154E, Q154H, Q154M, Q154R, Q154L, Q154S, Q154V, Q154Q, Q154F, Q154I, Q154A, Q154K, E155F, E155G, E155I, E155K, E155P, E155V, E155D, E155E, E155L, E155Q, I156V, I156A, I156I, I156L, I156F, I156D, I156K, I156N, I156R, I156Y, E157A, E157F, E157I, E157P, E157T, E157V, N157K, K157N, K157V, K157P, K157I, K157F, K157F, K157T, K157A, K157S, K157R, A158Q, A158K, A158V, A158A, A158D, A158S, A158T, A158N, Q159S, Q159Q, Q159A, Q159F, Q159K, Q159L, Q159N, K160A, K160S, K160E, K160K, K160N, K160F, K160Q, K161T, K161K, K161R, K161I, K161A, K161N, K161Q, K161S, K161T, A162D, A162Q, R162H, R162P, A162S, A162A, A162N, A162M, A162K, Q163G, Q163S, Q163Q, Q163A, Q163H, Q163N, Q163R, S164F, S164S, S164Q, S164I, S164R, S164Y, S165S, S165P, S165Q, S165A, S165D, S165I, S165T, S165Y, T166T, T166Q, T166E, T166S, T166D, T166K, T166I, T166N, T166P, T166R, D167S D167D, D167I, D167G, D167T, D167A and/or D167N mutation in a TadA reference sequence (e.g., TadA*7.10,ecTadA, or TadA8e), and any alternative mutation at the corresponding position, or one or more corresponding mutations in another adenosine deaminase. Additional mutations are described in U.S. Patent Application Publication No. 2022/0307003 A1 U.S.

[0200] U.S. Pat. No. 11,155,803, and International Patent Application Publications No. WO 2023/288304 A2, PCT/CN2022/143408, WO 2018/027078 A1, WO 2021/158921 A1 and WO 2023/034959 A2, the disclosures of which are incorporated herein by reference in their entirety for all purposes.

[0201] In various embodiments, an adenosine deaminase of the disclosure lacks an N-terminal methionine.

[0202] In some embodiments, the disclosure provides TadA variants comprising an alteration at an amino acid selected from one or more of L36, 176, V82, Y147, Q154, and N157 compared to TadA*7.10. In some embodiments, the disclosure provides TadA variants comprising one or more of the following alterations relative to TadA*7.10: L36H, I76Y, V82T, Y147T, Q154S, and N157K. In some embodiments, the disclosure provides TadA variants comprising the following alterations relative to TadA*7.10: L36H, I76Y, V82T, Y147T, Q154S, and N157K. In some embodiments, the disclosure provides TadA variants comprising the following alterations relative to TadA*7.10: F84Y, A109L, A109V, A109I, A109F, A109S, A109T, A109N, V155S, V155T, V155N, F156Y, F156W, F156R, F156N, and F156Q. In some embodiments, the disclosure provides TadA variants comprising the following alterations relative to TadA*7.10: E3N, E3K, E3G, F6A, H14D, L18A, W23I, W23R, P29T, P29Y, P29Q, V35Q, L36S, N38D, G42M, N46Y, P48A, G50A, H52L, A62V, L63R, L63F, Q65R, G67N, L68V, M70I, N72Y, T79H, Y81V, V82S, M94R, G100V, V102E, V102S, R107A, A114C, G115E, M118L, D119L, H122T, P124H, P124K, P124Q, H128R, V130F, I132K, I132T, E140L, A142N, A142S, L144Q, L145R, L145N, Y147A, F149A, R152P, F156N, and K160E.

[0203] In some embodiments, the disclosure provides TadA variants comprising a V82T, Y147T, and/or a Q154S mutation. In some embodiments, the disclosure provides TadA variants comprising a V82T, Y147T, and/or a Q154S mutation. In some embodiments, the disclosure provides TadA*8.8 further comprising a V82T mutation. In some embodiments, the disclosure provides TadA*8.8 further comprising a V82T, a Y147T, and a Q154S mutation. In some embodiments, the disclosure provides TadA*8.17 further comprising a V82T mutation. In some embodiments, the disclosure provides TadA*8.17 further comprising a V82T, a Y147T, and a Q154S mutation. In some embodiments, the disclosure provides TadA*8.20 further comprising a V82T mutation. In some embodiments, the disclosure provides TadA*8.20 further comprising a V82T, a Y147T, and a Q154S mutation.

[0204] In embodiments, a variant of TadA*7.10 comprises one or more alterations selected from any of those alterations provided herein.

[0205] In particular embodiments, an adenosine deaminase heterodimer comprises a TadA*8 domain and an adenosine deaminase domain selected from Staphylococcus aureus (S. aureus) TadA, Bacillus subtilis (B. subtilis) TadA, Salmonella typhimurium (S. typhimurium) TadA, Shewanella putrefaciens (S. putrefaciens) TadA, Haemophilus influenzae F3031 (H. influenzae) TadA, Caulobacter crescentus (C. crescentus) TadA, Geobacter sulfurreducens (G. sulfurreducens) TadA, or TadA*7.10.

[0206] In some embodiments, the TadA*8 is a variant as shown in Table 5D. Table 5D shows certain amino acid position numbers in the TadA amino acid sequence and the amino acids present in those positions in the TadA-7.10 adenosine deaminase. Table 5D also shows amino acid changes in TadA variants relative to TadA-7.10 following phage-assisted non-continuous evolution (PANCE) and phage-assisted continuous evolution (PACE), as described in M. Richter et al., 2020, Nature Biotechnology, doi.org/10.1038/s41587-020-0453-z, the entire contents of which are incorporated by reference herein. In some embodiments, the TadA*8 is TadA*8a, TadA*8b, TadA*8c, TadA*8d, or TadA*8e. In some embodiments, the TadA*8 is TadA*8e. In one embodiment, an adenosine deaminase is a TadA*8 that comprises or consists essentially of SEQ ID NO: 316 or a fragment thereof having adenosine deaminase activity.

TABLE 5D
Select TadA*8 Variants

| | | TadA amino acid number | | | | | | | | | |
|---|---|---|---|---|---|---|---|---|---|---|---|
| | TadA | 26 | 88 | 109 | 111 | 119 | 122 | 147 | 149 | 166 | 167 |
| | TadA- | R | V | A | T | D | H | Y | F | T | D |
| | 7.10 | | | | | | | | | | |
| PANCE 1 | | | | | R | | | | | | |
| PANCE 2 | | | | S/T | R | | | | | | |
| PACE | TadA-8a | C | | S | R | N | N | D | Y | I | N |
| | TadA-8b | | A | S | R | N | N | | Y | I | N |
| | TadA-8c | C | | S | R | N | N | | Y | I | N |
| | TadA-8d | | A | | R | N | | | Y | | |
| | TadA-8e | | | S | R | N | N | D | Y | I | N |

[0207] In some embodiments, the TadA variant is a variant as shown in Table 5E. Table 5E 5 shows certain amino acid position numbers in the TadA amino acid sequence and the amino acids present in those positions in the TadA*7.10 adenosine deaminase. In some embodiments, the TadA variant is MSP605, MSP680, MSP823, MSP824, MSP825, MSP827, MSP828, or MSP829. In some embodiments, the TadA variant is MSP828. In some embodiments, the TadA variant is MSP829.

TABLE 5E
TadA Variants

| | TadA Amino Acid Number | | | | | | | |
|---|---|---|---|---|---|---|---|---|
| Variant | 36 | 76 | 82 | 147 | 149 | 154 | 157 | 167 |
| TadA-7.10 | L | I | V | Y | F | Q | N | D |
| MSP605 | | | G | T | | S | | |
| MSP680 | | Y | G | T | | S | | |
| MSP823 | H | | G | T | | S | K | |
| MSP824 | | | G | D | Y | S | | N |
| MSP825 | H | | G | D | Y | S | K | N |
| MSP827 | H | Y | G | T | | S | K | |
| MSP828 | | Y | G | D | Y | S | | N |
| MSP829 | H | Y | G | D | Y | S | K | N |

TABLE 5F
TadA Variants

| | Amino Acid No. | | | | | | | | | |
|---|---|---|---|---|---|---|---|---|---|---|
| | 23 | 36 | 48 | 51 | 76 | 82 | 84 | 106 | 108 | 123 |
| | TadA (wt) | | | | | | | | | |
| Description | W | H | P | R | I | V | L | A | D | H |
| TadA*7.10 | R | L | A | L | I | V | F | V | N | Y |
| TadA*8.8 | | | | | | | | | | H |
| TadA*8.13 | | | | | Y | | | | | H |
| TadA*8.17 | | | | | | S | | | | |
| TadA*8.20 | | | | | Y | S | | | | H |
| TadA*8.8 + V82T | | | | | | T | | | | H |
| TadA*8.8 + V82T + | | | | | | T | | | | H |
| Y147T + Q154S | | | | | | | | | | |
| TadA*8.17 + V82T | | | | | | T | | | | |
| TadA*8.17 + V82T + | | | | | | T | | | | |
| Y147T + Q154S | | | | | | | | | | |
| TadA*8.20 + V82T | | | | | Y | T | | | | H |
| TadA*8.20 + V82T + | | | | | Y | T | | | | H |
| Y147T + Q154S | | | | | | | | | | |

| | Amino Acid No. | | | | | | | |
|---|---|---|---|---|---|---|---|---|
| | 146 | 147 | 152 | 154 | 155 | 156 | 157 | 166 |
| | TadA (wt) | | | | | | | |
| Official Name | S | D | R | Q | E | I | K | T |
| TadA*7.10 | C | Y | P | Q | V | F | N | T |
| TadA*8.8 | | R | | R | | | | |
| TadA*8.13 | | R | | R | | | | |
| TadA*8.17 | | | | R | | | | |
| TadA*8.20 | | R | | R | | | | |
| TadA*8.8 + V82T | | R | | R | | | | |
| TadA*8.8 + V82T + | | T | | S | | | | |
| Y147T + Q154S | | | | | | | | |
| TadA*8.17 + V82T | | | | R | | | | |
| TadA*8.17 + V82T + | | T | | S | | | | |
| Y147T + Q154S | | | | | | | | |
| TadA*8.20 + V82T | | R | | R | | | | |
| TadA*8.20 + V82T + | | T | | S | | | | |
| Y147T + Q154S | | | | | | | | |

[0208] In particular embodiments, the fusion proteins or complexes comprise a single (e.g., provided as a monomer) TadA* (e.g., TadA*8 or TadA*9). Throughout the present disclosure, an adenosine deaminase base editor that comprises a single TadA* domain is indicates using the terminology ABEm or ABE #m, where “#” is an identifying number (e.g., ABE8.20m), where “m” indicates “monomer.” In some embodiments, the TadA* is linked to a Cas9 nickase. In some embodiments, the fusion proteins or complexes of the disclosure comprise as a heterodimer of a wild-type TadA (TadA(wt)) linked to a TadA*. Throughout the present disclosure, an adenosine deaminase base editor that comprises a single TadA* domain and a TadA(wt) domain is indicates using the terminology ABEd or ABE #d, where “#” is an identifying number (e.g., ABE8.20d), where “d” indicates “dimer.” In other embodiments, the fusion proteins or complexes of the disclosure comprise as a heterodimer of a TadA*7.10 linked to a TadA*. In some embodiments, the base editor is ABE8 comprising a TadA* variant monomer. In some embodiments, the base editor is ABE comprising a heterodimer of a TadA* and a TadA(wt). In some embodiments, the base editor is ABE comprising a heterodimer of a TadA* and TadA*7.10. In some embodiments, the base editor is ABE comprising a heterodimer of a TadA*. In some embodiments, the TadA* is selected from Tables 5A-5E.

[0209] In some embodiments, the adenosine deaminase is expressed as a monomer. In other embodiments, the adenosine deaminase is expressed as a heterodimer. In some embodiments, the deaminase or other polypeptide sequence lacks a methionine, for example when included as a component of a fusion protein. This can alter the numbering of positions. However, the skilled person will understand that such corresponding mutations refer to the same mutation.

[0210] Any of the mutations provided herein and any additional mutations (e.g., based on the ecTadA amino acid sequence) can be introduced into any other adenosine deaminases. Any of the mutations provided herein can be made individually or in any combination in a TadA reference sequence or another adenosine deaminase (e.g., ecTadA).

[0211] Details of A to G nucleobase editing proteins are described in International PCT Application No. PCT/US2017/045381 (WO2018/027078) and Gaudelli, N. M., et al., “Programmable base editing of A·T to G·C in genomic DNA without DNA cleavage” Nature, 551, 464-471 (2017), the entire contents of which are hereby incorporated by reference.

### C to T Editing

[0212] In some embodiments, a base editor disclosed herein comprises a fusion protein or complex comprising cytidine deaminase capable of deaminating a target cytidine (C) base of a polynucleotide to produce uridine (U), which has the base pairing properties of thymine. In some embodiments, for example where the polynucleotide is double-stranded (e.g., DNA), the uridine base can then be substituted with a thymidine base (e.g., by cellular repair machinery) to give rise to a C:G to a T:A transition. In other embodiments, deamination of a C to U in a nucleic acid by a base editor cannot be accompanied by substitution of the U to a T.

[0213] The deamination of a target C in a polynucleotide to give rise to a U is a non-limiting example of a type of base editing that can be executed by a base editor described herein. In another example, a base editor comprising a cytidine deaminase domain can mediate conversion of a cytosine (C) base to a guanine (G) base. For example, a U of a polynucleotide produced by deamination of a cytidine by a cytidine deaminase domain of a base editor can be excised from the polynucleotide by a base excision repair mechanism (e.g., by a uracil DNA glycosylase (UDG) domain), producing an abasic site. The nucleobase opposite the abasic site can then be substituted (e.g., by base repair machinery) with another base, such as a C, by for example a translesion polymerase. Although it is typical for a nucleobase opposite an abasic site to be replaced with a C, other substitutions (e.g., A, G or T) can also occur.

[0214] Accordingly, in some embodiments a base editor described herein comprises a deamination domain (e.g., cytidine deaminase domain) capable of deaminating a target C to a U in a polynucleotide. Further, as described below, the base editor can comprise additional domains which facilitate conversion of the U resulting from deamination to, in some embodiments, a T or a G. For example, a base editor comprising a cytidine deaminase domain can further comprise a uracil glycosylase inhibitor (UGI) domain to mediate substitution of a U by a T, completing a C-to-T base editing event. In another example, the base editor can comprise a uracil stabilizing protein as described herein. In another example, a base editor can incorporate a translesion polymerase to improve the efficiency of C-to-G base editing, since a translesion polymerase can facilitate incorporation of a C opposite an abasic site (i.e., resulting in incorporation of a G at the abasic site, completing the C-to-G base editing event).

[0215] A base editor comprising a cytidine deaminase as a domain can deaminate a target C in any polynucleotide, including DNA, RNA and DNA-RNA hybrids.

[0216] In some embodiments, a cytidine deaminase of a base editor comprises all or a portion (e.g., a functional portion) of an apolipoprotein B mRNA editing complex (APOBEC) family deaminase. APOBEC is a family of evolutionarily conserved cytidine deaminases. Members of this family are C-to-U editing enzymes. The N-terminal domain of APOBEC like proteins is the catalytic domain, while the C-terminal domain is a pseudocatalytic domain. More specifically, the catalytic domain is a zinc dependent cytidine deaminase domain and is important for cytidine deamination. APOBEC family members include APOBEC1, APOBEC2, APOBEC3A, APOBEC3B, APOBEC3C, APOBEC3D (“APOBEC3E” now refers to this), APOBEC3F, APOBEC3G, APOBEC3H, APOBEC4, and Activation-induced (cytidine) deaminase.

[0217] Other exemplary deaminases that can be fused to Cas9 according to aspects of this disclosure are provided below. In embodiments, the deaminases are activation-induced deaminases (AID). It should be understood that, in some embodiments, the active domain of the respective sequence can be used, e.g., the domain without a localizing signal (nuclear localization sequence, without nuclear export signal, cytoplasmic localizing signal).

[0218] Some aspects of the present disclosure are based on the recognition that modulating the deaminase domain catalytic activity of any of the fusion proteins or complexes described herein, for example by making point mutations in the deaminase domain, affect the processivity of the fusion proteins (e.g., base editors) or complexes. For example, mutations that reduce, but do not eliminate, the catalytic activity of a deaminase domain within a base editing fusion protein or complexes can make it less likely that the deaminase domain will catalyze the deamination of a residue adjacent to a target residue, thereby narrowing the deamination window. The ability to narrow the deamination window can prevent unwanted deamination of residues adjacent to specific target residues, which can reduce or prevent off-target effects.

[0219] In some embodiments, an APOBEC deaminase incorporated into a base editor can comprise one or more mutations selected from the group consisting of R33A, K34A, E63A, H102P, D104N, H121R, H122R, H122L, D124N; R126A, R126E, R118A, W90A, W90Y, and R132E of rAPOBEC1; D316R, D317R, R320A, R320E, R313A, W285A, W285Y, and R326E of hAPOBEC3G; and any alternative mutation at the corresponding position, or one or more corresponding mutations in another APOBEC deaminase. In some embodiments, an APOBEC deaminase incorporated into a base editor can comprise one or more combinations of mutations selected from K34A, H122L, and D124N (AALN); H102P and D104N (evoFERNY derived from FERNY); W90Y and R126E (YE1); W90Y and R132E (YE2); R126E and R132E (EE); W90Y, R126E, and R132E (YEE), or rAPOBEC1; and any alternative mutation at the corresponding positions, or one or more corresponding mutations in another APOBEC deaminase.

[0220] A number of modified cytidine deaminases are commercially available, including, but not limited to, SaBE3, SaKKH-BE3, VQR-BE3, EQR-BE3, VRER-BE3, YE1-BE3, EE-BE3, YE2-BE3, and YEE-BE3, which are available from Addgene (plasmids 85169, 85170, 85171, 85172, 85173, 85174, 85175, 85176, 85177). In some embodiments, a deaminase incorporated into a base editor comprises all or a portion (e.g., a functional portion) of an APOBEC1 deaminase.

[0221] In some embodiments, the fusion proteins or complexes of the disclosure comprise one or more cytidine deaminase domains. In some embodiments, the cytidine deaminases provided herein are capable of deaminating cytosine or 5-methylcytosine to uracil or thymine. In some embodiments, the cytidine deaminases provided herein are capable of deaminating cytosine in DNA. The cytidine deaminase may be derived from any suitable organism. In some embodiments, the cytidine deaminase is a naturally-occurring cytidine deaminase that includes one or more mutations corresponding to any of the mutations provided herein. One of skill in the art will be able to identify the corresponding residue in any homologous protein, e.g., by sequence alignment and determination of homologous residues. Accordingly, one of skill in the art would be able to generate mutations in any naturally-occurring cytidine deaminase that corresponds to any of the mutations described herein. In some embodiments, the cytidine deaminase is from a prokaryote. In some embodiments, the cytidine deaminase is from a bacterium. In some embodiments, the cytidine deaminase is from a mammal (e.g., human).

[0222] In some embodiments, the cytidine deaminase comprises an amino acid sequence that is at least 60%, at least 65%, at least 70%, at least 75%, at least 80%, at least 85%, at least 90%, at least 95%, at least 96%, at least 97%, at least 98%, at least 99%, or at least 99.5% identical to any one of the cytidine deaminase amino acid sequences set forth herein. It should be appreciated that cytidine deaminases provided herein may include one or more mutations (e.g., any of the mutations provided herein). Some embodiments provide a polynucleotide molecule encoding the cytidine deaminase nucleobase editor polypeptide of any previous aspect or as delineated herein. In some embodiments, the polynucleotide is codon optimized.

[0223] In embodiments, a fusion protein of the disclosure comprises two or more nucleic acid editing domains.

[0224] Details of C to T nucleobase editing proteins are described in International PCT Application No. PCT/US2016/058344 (WO2017/070632) and Komor, A. C., et al., “Programmable editing of a target base in genomic DNA without double-stranded DNA cleavage” Nature 533, 420-424 (2016), the entire contents of which are hereby incorporated by reference. Further non-limiting examples of C to T nucleobase editing proteins are described in PCT Applications No. PCT/US2020/062428 and PCT/US2019/033848, the entire contents of which are hereby incorporated by reference.

### Cytidine Adenosine Base Editors (CABEs)

[0225] In some embodiments, a base editor described herein comprises an adenosine deaminase variant that has increased cytidine deaminase activity. Such base editors may be referred to as “cytidine adenosine base editors (CABEs)” or “cytosine base editors derived from TadA* (CBE-Ts),” and their corresponding deaminase domains may be referred to as “TadA* acting on DNA cytosine (T_{AD}C)” domains or TadA-derived cytidine deaminases (TadA-CD).

[0226] Base editors containing adenosine deaminase variants having both cytidine deamianse and adenosine deaminase activity (i.e., TadA-Dual deaminases) may be referred to as TadA-based dual editors (TadDE). In some instances, an adenosine deaminase variant has both adenine and cytosine deaminase activity (i.e., is a dual deaminase). In some embodiments, the adenosine deaminase variants deaminate adenine and cytosine in DNA. In some embodiments, the adenosine deaminase variants deaminate adenine and cytosine in single-stranded DNA. In some embodiments, the adenosine deaminase variants deaminate adenine and cytosine in RNA. In some embodiments, the adenosine deaminase variant predominantly deaminates cytosine in DNA and/or RNA (e.g., greater than 30%, 40%, 50%, 60%, 70%, 80%, 90%, 95%, or 99% of all deaminations catalyzed by the adenosine deaminase variant, or the number of cytosine deaminations catalyzed by the variant is about or at least about 2-fold, 3-fold, 4-fold, 5-fold, 6-fold, 7-fold, 8-fold, 9-fold, 10-fold, 25-fold, 50-fold, 75-fold, 100-fold, 500-fold, or 1,000-fold greater than the number adenine deaminations catalyzed by the variant). In some embodiments, the adenosine deaminase variant has approximately equal cytosine and adenosine deaminase activity (e.g., the two activities are within about 10% or 20% of each other). In some embodiments, the adenosine deaminase variant has predominantly cytosine deaminase activity, and little, if any, adenosine deaminase activity. In some embodiments, the adenosine deaminase variant has cytosine deaminase activity, and no significant or no detectable adenosine deaminase activity. In some embodiments, the target polynucleotide is present in a cell in vitro or in vivo. In some embodiments, the cell is a bacteria, yeast, fungi, insect, plant, or mammalian cell. Examples of adenosine deaminase variants having increased cytidine deaminase activity include those described in International Patent Application Publications No. WO 2024/040083 and WO 2022/204574, the disclosures of which are hereby incorporated by reference in their entireties for all purposes.

[0227] In some embodiments, the CABE comprises a bacterial TadA deaminase variant (e.g., ecTadA). In some embodiments, the CABE comprises a truncated TadA deaminase variant. In some embodiments, the CABE comprises a fragment of a TadA deaminase variant. In some embodiments, the CABE comprises a TadA*8.20 variant.

[0228] In some embodiments, an adenosine deaminase variant of the disclosure is a TadA adenosine deaminase comprising one or more alterations that increase cytosine deaminase activity (e.g., at least about 10-fold, 20-fold, 30-fold, 40-fold, 50-fold, 60-fold, 70-fold or more increase) while maintaining adenosine deaminase activity (e.g., at least about 30%, 40%, 50% or more of the activity of a reference adenosine deaminase (e.g., TadA*8.20 or TadA*8.19)). In some instances, the adenosine deaminase variant comprises one or more alterations that increase cytosine deaminase activity (e.g., at least about 10-fold, 20-fold, 30-fold, 40-fold, 50-fold, 60-fold, 70-fold or more increase) relative to the activity of a reference adenosine deaminase and comprise undetectable adenosine deaminase activity or adenosine deaminase activity that is less than 30%, 20%, 10%, or 5% of that of a reference adenosine deaminase. In some embodiments, the reference adenosine deaminase is TadA*8.20 or TadA*8.19.

[0229] In some embodiments, the adenosine deaminase variant is an adenosine deaminase comprising two or more alterations at an amino acid position selected from the group consisting of 2, 4, 6, 8, 13, 17, 23, 27, 29, 30, 47, 48, 49, 67, 76, 77, 82, 84, 96, 100, 107, 112, 114, 115, 118, 119, 122, 127, 142, 143, 147, 149, 158, 159, 162 165, 166, and 167, of an amino acid sequence having at least about 70%, 75%, 80%, 85%, 90%, 95%, 98%, 99% or greater identity to SEQ ID NO: 1, or a corresponding alteration in another deaminase. I

[0230] In some embodiments, the adenosine deaminase variant is an adenosine deaminase comprising one or more alterations selected from the group consisting of S2H, V4K, V4S, V4T, V4Y, F6G, F6H, F6Y, H8Q, R13G, T17A, T17W, R23Q, E27C, E27G, E27H, E27K, E27Q, E27S, E27G, P29A, P29G, P29K, V30F, V30I, R47G, R47S, A48G, 149K, 149M, 149N, 149Q, I49T, G67W, I76H, I76R, I76W, Y76H, Y76R, Y76W, F84A, F84M, H96N, G100A, G100K, T111H, G112H, A114C, G115M, M118L, H122G, H122R, H122T, N127I, N127K, N127P, A142E, R147H, A158V, Q159S, A162C, A162N, A162Q, and S165P of an amino acid sequence having at least about 70%, 75%, 80%, 85%, 90%, 95%, 98%, 99% or greater identity to SEQ ID NO: 1, or a corresponding alteration in another deaminase.

[0231] In some embodiments, the adenosine deaminase variant is an adenosine deaminase comprising an amino acid alteration or combination of amino acid alterations selected from those listed in any of Tables 6A-6F.

[0232] The residue identity of exemplary adenosine deaminase variants that are capable of deaminating adenine and/or cytidine in a target polynucleotide (e.g., DNA) is provided in Tables 6A-6F below. Further examples of adenosine deaminase variants include the following variants of 1.17 (see Table 6A): 1.17+E27H; 1.17+E27K; 1.17+E27S; 1.17+E27S+I49K; 1.17+E27G; 1.17+I49N; 1.17+E27G+I49N; and 1.17+E27Q. In some embodiments, any of the amino acid alterations provided herein are substituted with a conservative amino acid. Additional mutations known in the art can be further added to any of the adenosine deaminase variants provided herein.

[0233] In some embodiments, the base editor systems comprising a CABE provided herein have at least about a 30%, 40%, 50%, 60%, 70% or more C to T editing activity in a target polynucleotide (e.g., DNA). In some embodiments, a base editor system comprising a CABE as provided herein has an increased C to T base editing activity (e.g., increased at least about 30-fold, 40-fold, 50-fold, 60-fold, 70-fold or more) relative to a reference base editor system comprising a reference adenosine deaminase (e.g., TadA*8.20 or TadA*8.19).

TABLE 6A
Adenosine Deaminase Variants. Mutations are indicated with reference to TadA*8.20.

| | location in structure | | | | | | | | | | |
|---|---|---|---|---|---|---|---|---|---|---|---|
| | N/A | S h1 | S h1 | S h1 | NAS | NAS | NAS | NAS | | S | |
| | Amino Acid No. (*START Met is AA#1) | | | | | | | | | | |
| | 2 | 8 | 13 | 17 | 27 | 47 | 48 | 49 | 67 | 76 | 77 |
| TadA*8.20 | S | H | R | T | E | R | A | I | G | Y | D |
| TadA*8.19 | | | | | | | | | | I | |
| 1.1 | | | | | H | | | | | I | |
| 1.2 | | | | | H | | | K | | I | |
| 1.3 | | | | | S | | | K | | I | |
| 1.4 | | | | | S | | | K | | I | |
| 1.5 | | | | | K | | | | | | |
| 1.6 | | | | | K | | | | | | |
| 1.7 | | | | | H | | | | | I | |
| 1.8 | | | | | S | | | K | W | | |
| 1.9 | | | | | | | | T | W | | |
| 1.10 | | | | | C | | | | | I | |
| 1.11 | | | G | | Q | | | | | | |
| 1.12 | | | | A | H | | | M | | I | |
| 1.13 | | | | | | | | Q | | T | |
| 1.14 | H | | | | | | | K | | I | |
| 1.15 | | | | | | S | | | | | |
| 1.16 | | Q | | | | | | Q | | I | |
| 1.17 | | | | A | | | G | | | | |
| 1.18 | | | | | G | | | | | | |
| 1.19 | | | | | G | | | N | | | |
| 1.20 | | | | | G | | | | | | G |

| | location in structure | | | | | | | | | | | |
|---|---|---|---|---|---|---|---|---|---|---|---|---|
| | I | NAS | | NAS | S | | S | S | S | | S | |
| | Amino Acid No. (*START Met is AA#1) | | | | | | | | | | | |
| | 82 | 84 | 96 | 107 | 112 | 115 | 118 | 119 | 127 | 142 | 162 | 165 |
| TadA*8.20 | S | F | H | R | G | G | M | D | N | A | A | S |
| TadA*8.19 | | | | | | | | | | | | |
| 1.1 | | M | | | | | | | | | | |
| 1.2 | | | | | | | | | | | | |
| 1.3 | | | | | | | | | | | | |
| 1.4 | | | | | | | | | | | N | |
| 1.5 | | | | | | | | | | | | |
| 1.6 | | | | | | | | N | | | | |
| 1.7 | | | | | | | | | | | | |
| 1.8 | | | | | | | | | | | | |
| 1.9 | | | N | | | | | | | | | |
| 1.10 | | | | | | | | N | | | | |
| 1.11 | | | | | | | | | K | | | |
| 1.12 | | | | | | | L | | | | | |
| 1.13 | | | | | | M | | | | | | |
| 1.14 | | | | | H | | | | | | | |
| 1.15 | | | | C | | | | | | | | |
| 1.16 | | | | | | | | | | | | |
| 1.17 | T | | | | | | | | | E | | |
| 1.18 | | | | | | | | | | | | |
| 1.19 | | | | | | | | | | | | |
| 1.20 | | | | | | | | | | | | P |

“I” indicates “Internal,” “S” indicates “Surface,” and “NAS” indicates “Near Active Site.”

TABLE 6B
Adenosine deaminase variants. Mutations are
indicated with reference to TadA*8.20.

| | Position No. | | | | | | | | | |
|---|---|---|---|---|---|---|---|---|---|---|
| | 27 | 29 | 30 | 49 | 82 | 84 | 107 | 112 | 115 | 142 |
| | TadA*8.20 | | | | | | | | | |
| | E | P | V | I | S | F | R | G | G | A |
| | Alterations Evaluated | | | | | | | | | |
| | G/S/H | G/A/K | I/L/F | K | T | L/A | C | H | M | E |
| S1.1 | S | | | K | T | | | | | |
| S1.2 | S | | | K | T | | C | | | |
| S1.3 | S | | | K | T | | | H | | |
| S1.4 | S | | | K | T | | | | M | |
| S1.5 | S | | | K | T | | | | | E |
| S1.6 | S | | | K | T | | C | H | | |
| S1.7 | S | | | K | T | | C | | M | |
| S1.8 | S | | | K | T | | C | | | E |
| S1.9 | S | | | K | T | | | H | | E |
| S1.10 | S | | | K | T | | | | M | E |
| S1.11 | S | | | K | T | | C | H | M | E |
| S1.12 | S | | I | K | T | | | | | |
| S1.13 | S | | I | K | T | | C | | | |
| S1.14 | S | | I | K | T | | | H | | |
| S1.15 | S | | I | K | T | | | | M | |
| S1.16 | S | | I | K | T | | | | | E |
| S1.17 | S | | I | K | T | | C | H | | |
| S1.18 | S | | I | K | T | | C | | M | |
| S1.19 | S | | I | K | T | | C | | | E |
| S1.20 | S | | I | K | T | | | H | | E |
| S1.21 | S | | I | K | T | | | | M | E |
| S1.22 | S | | I | K | T | | C | H | M | E |
| S1.23 | S | | L | K | T | | | | | |
| S1.24 | S | | T | K | T | | C | | | |
| S1.25 | S | | L | K | T | | | H | | |
| S1.26 | S | | T | K | T | | | | M | |
| S1.27 | S | | L | K | T | | | | | E |
| S1.28 | S | | T | K | T | | C | H | | |
| S1.29 | S | | I | K | T | | C | | M | |
| $1.30 | S | | L | K | T | | C | | | E |
| S1.31 | S | | L | K | T | | | H | | E |
| S1.32 | S | | H | K | T | | | | M | E |
| S1.33 | S | | T | K | T | | C | H | M | E |
| S1.34 | S | | F | K | T | A | | | | |
| S1.35 | S | | F | K | T | A | C | | | |
| S1.36 | S | | F | K | T | A | | H | | |
| S1.37 | S | | F | K | T | A | | | M | |
| S1.38 | S | | F | K | T | A | | | | E |
| S1.39 | S | | F | K | T | A | C | H | | |
| S1.40 | S | | F | K | T | A | C | | M | |
| S1.41 | S | | F | K | T | A | C | | | E |
| S1.42 | S | | F | K | T | A | | H | | E |
| S1.43 | S | | F | K | T | A | | | M | E |
| S1.44 | S | | F | K | T | A | C | H | M | E |
| S1.45 | S | | | K | T | L | | | | |
| S1.46 | S | | | K | T | L | C | | | |
| S1.47 | S | | | K | T | L | | H | | |
| S1.48 | S | | | K | T | L | | | M | |
| S1.49 | S | | | K | T | L | | | | E |
| S1.50 | S | | | K | T | L | C | H | | |
| S1.51 | S | | | K | T | L | C | | M | |
| S1.52 | S | | | K | T | L | C | | | E |
| S1.53 | S | | | K | T | L | | H | | E |
| S1.54 | S | | | K | T | L | | | M | E |
| S1.55 | S | | | K | T | L | C | H | M | E |
| S1.56 | S | | I | K | T | L | | | | |
| S1.57 | S | | | K | T | L | C | | | |
| S1.58 | S | | T | K | T | 1 | | H | | |
| $1.59 | S | | I | K | T | L | | | M | |
| S1.60 | S | | I | K | T | L | | | | E |
| S1.61 | S | | I | K | T | L | C | H | | |
| S1.62 | S | | I | K | T | L | C | | M | |
| S1.63 | S | | I | K | T | L | C | | | E |
| S1.64 | S | | H | K | T | L | | H | | E |
| S1.65 | S | | H | K | T | L | | | M | E |
| S1.66 | S | | I | K | T | L | C | H | M | E |
| S1.67 | S | G | | K | T | | | | | |
| S1.68 | S | G | | K | T | | C | | | |
| S1.69 | S | G | | K | T | | | H | | |
| S1.70 | S | G | | K | T | | | | M | |
| S1.71 | S | G | | K | T | | | | | E |
| S1.72 | S | G | | K | T | | C | H | | |
| S1.73 | S | G | | K | T | | C | | M | |
| S1.74 | S | G | | K | T | | C | | | E |
| S1.75 | S | G | | K | T | | | H | | E |
| S1.76 | S | G | | K | T | | | | M | E |
| S1.77 | S | G | | K | T | | C | H | M | E |
| S1.78 | | G | | K | T | | | | | |
| S1.79 | | G | | K | T | | ? | | | |
| S1.80 | | G | | K | T | | | H | | |
| S1.81 | | G | | K | T | | | | M | |
| S1.82 | | G | | K | T | | | | | E |
| S1.83 | | G | | K | T | | C | H | | |
| S1.84 | | G | | K | T | | C | | M | |
| S1.85 | | G | | K | T | | C | | | E |
| S1.86 | | G | | K | T | | | H | | E |
| S1.87 | | G | | K | T | | | | M | E |
| S1.88 | | G | | K | T | | C | H | M | E |
| S1.89 | | K | | K | T | | | | | |
| $1.90 | | K | | K | T | | C | | | |
| S1.91 | | K | | K | T | | | H | | |
| S1.92 | | K | | K | T | | | | M | |
| S1.93 | | K | | K | T | | | | | E |
| S1.94 | | K | | K | T | | C | H | | |
| S1.95 | | K | | K | T | | C | | M | |
| S1.96 | | K | | K | T | | C | | | E |
| S1.97 | | K | | K | T | | | H | | E |
| $1.98 | | K | | K | T | | | | M | E |
| $1.99 | | K | | K | T | | C | H | M | E |
| S1.100 | | K | I | K | T | | | | | |
| S1.101 | | K | I | K | T | | C | | | |
| S1.102 | | K | I | K | T | | | H | | |
| S1.103 | | K | I | K | T | | | | M | |
| S1.104 | | K | I | K | T | | | | | E |
| S1.105 | | K | I | K | T | | C | H | | |
| S1.106 | | K | I | K | T | | C | | M | |
| S1.107 | | K | ? | K | T | | C | | | E |
| S1.108 | | K | T | K | T | | | H | | E |
| S1.109 | | K | I | K | T | | | | M | E |
| S1.110 | | K | ? | K | T | | C | H | M | E |
| S1.111 | | K | | K | T | L | | | | |
| S1.112 | | K | | K | T | L | C | | | |
| S1.113 | | K | | K | T | L | | H | | |
| S1.114 | | K | | K | T | L | | | M | |
| S1.115 | | K | | K | T | L | | | | E |
| S1.116 | | K | | K | T | L | C | H | | |
| S1.117 | | K | | K | T | L | C | | M | |
| S1.118 | | K | | K | T | L | C | | | E |
| S1.119 | | K | | K | T | L | | H | | E |
| S1.120 | | K | | K | T | L | | | M | E |
| S1.121 | | K | | K | T | L | C | H | M | E |
| S1.122 | | K | I | K | T | L | | | | |
| S1.123 | | K | I | K | T | L | C | | | |
| S1.124 | | K | T | K | T | L | | H | | |
| S1.125 | | K | I | K | T | L | | | M | |
| S1.126 | | K | I | K | T | L | | | | E |
| S1.127 | | K | I | K | T | L | C | H | | |
| S1.128 | | K | ? | K | T | L | C | | M | |
| S1.129 | | K | I | K | T | L | C | | | E |
| S1.130 | | K | I | K | T | L | | H | | E |
| S1.131 | | K | I | K | T | L | | | M | E |
| S1.132 | | K | I | K | T | L | C | H | M | E |
| S1.133 | G | | | K | T | | | | | |
| S1.134 | G | | | K | T | | C | | | |
| S1.135 | G | | | K | T | | | H | | |
| S1.136 | G | | | K | T | | | | M | |
| S1.137 | G | | | K | T | | | | | E |
| S1.138 | G | | | K | T | | C | H | | |
| S1.139 | G | | | K | T | | C | | M | |
| S1.140 | G | | | K | T | | C | | | F |
| S1.141 | G | | | K | T | | | H | | E |
| S1.142 | G | | | K | T | | | | M | E |
| S1.143 | G | | | K | T | | C | H | M | E |
| S1.144 | H | | | K | T | | | | | |
| S1.145 | H | | | K | T | | C | | | |
| S1.146 | H | | | K | T | | | H | | |
| S1.147 | H | | | K | T | | | | M | |
| S1.148 | H | | | K | T | | | | | E |
| S1.149 | H | | | K | T | | C | H | | |
| S1.150 | H | | | K | T | | C | | M | |
| S1.151 | H | | | K | T | | C | | | E |
| S1.152 | H | | | K | T | | | H | | |
| S1.153 | H | | | K | T | | | | M | E |
| S1.154 | H | | | K | T | | C | H | M | E |
| S1.155 | S | | | | T | | | | | |
| S1.156 | S | | | | | | C | | | |
| S1.157 | S | | | | | | | H | | |
| S1.158 | S | | | | | | | | M | |
| S1.159 | S | | | | | | | | | E |
| S1.160 | S | | | | | | C | H | | |
| S1.161 | S | | | | | | | | M | |
| S1.162 | S | | | | | | C | | | E |
| S1.163 | S | | | | | | | H | | E |
| S1.164 | S | | | | | | | | M | E |
| S1.165 | S | | | | | | C | H | M | E |
| S1.166 | | A | | | | | | | | |
| S1.167 | | A | | | | | C | | | |
| S1.168 | | A | | | | | | H | | |
| S1.169 | | A | | | | | | | M | |
| S1.170 | | A | | | | | | | | E |
| S1.171 | | A | | | | | C | H | | |
| S1.172 | | A | | | | | | | M | |
| S1.173 | | A | | | | | C | | | E |
| S1.174 | | A | | | | | | H | | E |
| S1.175 | | A | | | | | | | M | E |
| S1.176 | | A | | | H | | C | H | M | E |
| S1.177 | S | | I | | | | | | | |
| S1.178 | S | | I | | | | C | | | |
| S1.179 | S | | I | | | | | H | | |
| S1.180 | S | | ? | | | | | | M | |
| S1.181 | S | | I | | | | | | | E |
| S1.182 | S | | I | | T | | C | H | | |
| S1.183 | S | | I | | | | C | | M | |
| S1.184 | S | | I | | | | C | | | E |
| S1.185 | S | | T | | | | | H | | E |
| S1.186 | S | | I | | | | | | M | E |
| S1.187 | S | | I | | | | C | H | M | E |
| S1.188 | | A | I | | | L | | | | |
| S1.189 | | A | I | | | L | C | | | |
| S1.190 | | A | I | | | L | | H | | |
| S1.191 | | A | I | | | L | | | M | |
| S1.192 | | A | I | | T | L | | | | E |
| S1.193 | | A | I | | T | L | C | H | | |
| S1.194 | | A | I | | | L | C | | M | |
| S1.195 | | A | I | | T | L | C | | | E |
| S1.196 | | A | I | | T | L | | H | | E |
| S1.197 | | A | I | | T | L | | | M | E |
| S1.198 | | A | I | | T | L | C | H | M | E |
| S1.199 | S | A | L | K | T | L | C | H | M | E |

TABLE 6C
Adenosine deaminase variants. Mutations are indicated with reference to variant 1.2 (Table 6A) .

| | | Residue identity (START Met is amino | | | | | | | | |
|---|---|---|---|---|---|---|---|---|---|---|
| Variant | Alternative Variant | acid #1) | | | | | | | | |
| Name | Names | 4 | 6 | 17 | 23 | 79 | 77 | 100 | 111 | 114 |
| Reference | 1.2 (see Table 6A) | V | F | T | R | I | D | G | T | A |
| TadAC2.1 | pDKL-135; 2.1 | K | | | | | | | | C |
| TadAC2.2 | pDKL-136; 2.2 | K | | | | | G | | | |
| TadAC2.3 | pDKL-137; 2.3 | | Y | | | | | A | | |
| TadAC2.4 | pDKL-138; 2.4 | T | | | | R | | | | |
| TadAC2.5 | pDKL-139; 2.5 | | Y | | | W | | | | |
| TadAC2.6 | pDKL-140; 2.6 | | Y | | | | | | | |
| TadAC2.7 | pDKL-141; 2.7 | | Y | | | | | | | C |
| TadAC2.8 | pDKL-142; 2.8 | | Y | | | | | | | |
| TadAC2.9 | pDKL-143; 2.9 | K | | | | W | | | | |
| TadAC2.10 | pDKL-144; 2.10 | | G | | | R | | K | | |
| TadAC2.11 | pDKL-145; 2.11 | | H | | | | | | | |
| TadAC2.12 | pDKL-146; 2.12 | | | | | | | | | C |
| TadAC2.13 | pDKL-147; 2.13 | | Y | | | H | | | | |
| TadAC2.14 | pDKL-148; 2.14 | | | | | | | | | |
| TadAC2.15 | pDKL-149; 2.15 | | | | Q | R | | | | |
| TadAC2.16 | pDKL-150; 2.16 | | | | | H | | | | |
| TadAC2.17 | pDKL-151; 2.17 | | Y | | | | | | H | |
| TadAC2.18 | pDKL-152; 2.18 | | | | | W | | | | |
| TadAC2.19 | pDKL-153; 2.19 | | | | | | | | H | |
| TadAC2.20 | pDKL-154; 2.20 | | | | | | | | | |
| TadAC2.21 | pDKL-155; 2.21 | | Y | | | R | | | | |
| TadAC2.22 | pDKL-156; 2.22 | | | M | | H | | | | |
| TadAC2.23 | pDKL-157; 2.23 | S | | | | Y | | | | |
| TadAC2.24 | pDKL-158; 2.24 | | | | | | | | | |

| | | Residue identity (START Met is | | | | | | | | |
|---|---|---|---|---|---|---|---|---|---|---|
| | Alternative Variant | amino acid #1) | | | | | | | | |
| Variant Name | Names | 119 | 122 | 127 | 143 | 147 | 158 | 159 | 162 | 166 |
| Reference | 1.2 (see Table 6A) | D | H | N | A | R | A | Q | A | T |
| TadAC2.1 | pDKL-135; 2.1 | | | | | | | | | |
| TadAC2.2 | pDKL-136; 2.2 | | | | | | | | | |
| TadAC2.3 | pDKL-137; 2.3 | | R | | | | | | | |
| TadAC2.4 | pDKL-138; 2.4 | | G | | | | | | | |
| TadAC2.5 | pDKL-139; 2.5 | | | | | | | | | |
| TadAC2.6 | pDKL-140; 2.6 | N | | | | | | | | |
| TadAC2.7 | pDKL-141; 2.7 | | | | | | | | | |
| TadAC2.8 | pDKL-142; 2.8 | | | | | | | | | |
| TadAC2.9 | pDKL-143; 2.9 | | T | | | | | | | |
| TadAC2.10 | pDKL-144; 2.10 | | | | | | | | | |
| TadAC2.11 | pDKL-145; 2.11 | | N | | | | | | | |
| TadAC2.12 | pDKL-146; 2.12 | | | | | | | | | |
| TadAC2.13 | pDKL-147; 2.13 | | R | | | | | | | I |
| TadAC2.14 | pDKL-148; 2.14 | | | P | | | | | | |
| TadAC2.15 | pDKL-149; 2.15 | | | | | | | | | |
| TadAC2.16 | pDKL-150; 2.16 | | R | | | | V | | | |
| TadAC2.17 | pDKL-151; 2.17 | | | | | | | | | |
| TadAC2.18 | pDKL-152; 2.18 | | | | | | | | | |
| TadAC2.19 | pDKL-153; 2.19 | | G | | | | | | C | |
| TadAC2.20 | pDKL-154; 2.20 | | | | E | | | | | |
| TadAC2.21 | pDKL-155; 2.21 | | | | | | | | | |
| TadAC2.22 | pDKL-156; 2.22 | | G | | | | V | | | |
| TadAC2.23 | pDKL-157; 2.23 | | | | E | | | S | | |
| TadAC2.24 | pDKL-158; 2.24 | | | I | | | | | Q | |

TABLE 6D
Adenosine deaminase variants. Mutations are indicated with reference to TadA*8.20.

| | AA Positions | | | | | | | | | | | | | | |
|---|---|---|---|---|---|---|---|---|---|---|---|---|---|---|---|
| | 6 | 27 | 49 | 76 | 77 | 82 | 107 | 112 | 114 | 115 | 119 | 122 | 127 | 142 | 143 |
| | TadA*8.20 | | | | | | | | | | | | | | |
| | F | E | I | Y | D | S | R | G | A | G | D | H | N | A | A |
| S1.154 | F | H | K | Y | D | T | C | H | | M | | | | E | |
| Alterations | Y | | | W | G | | | | C | | N | G | P | | E |
| from Table | | | | | | | | | | | | | | | |
| 6C | | | | | | | | | | | | | | | |
| S2.1 | Y | H | K | W | | T | C | H | | M | | | | E | |
| S2.2 | Y | H | K | | G | T | C | H | | M | | | | E | |
| S2.3 | Y | H | K | | | T | C | H | C | M | | | | E | |
| S2.4 | Y | H | K | | | T | C | H | | M | N | | | E | |
| S2.5 | Y | H | K | | | T | C | H | | M | | G | | E | |
| S2.6 | Y | H | K | | | T | C | H | | M | | | P | E | |
| S2.7 | Y | H | K | | | T | C | H | | M | | | | E | E |
| S2.8 | Y | H | K | | | T | C | H | | M | | | | A | E |
| S2.9 | Y | H | K | W | G | T | C | H | | M | | | | E | |
| S2.10 | Y | H | K | W | | T | C | H | C | M | | | | E | |
| S2.11 | Y | H | K | W | | T | C | H | | M | N | | | E | |
| S2.12 | Y | H | K | W | | T | C | H | | M | | G | | E | |
| S2.13 | Y | H | K | W | | T | C | H | | M | | | P | E | |
| S2.14 | Y | H | K | W | | T | C | H | | M | | | | E | E |
| S2.15 | Y | H | K | W | | T | C | H | | M | | | | A | E |
| S2.16 | Y | H | K | | G | T | C | H | C | M | | | | E | |
| S2.17 | Y | H | K | | | T | C | H | | M | N | | | E | |
| S2.18 | Y | H | K | | G | T | C | H | | M | | G | | E | |
| S2.19 | Y | H | K | | G | T | C | H | | M | | | P | E | |
| S2.20 | Y | H | K | | G | T | C | H | | M | | | | E | E |
| S2.21 | Y | H | K | | G | T | C | H | | M | | | | A | E |
| S2.22 | Y | H | K | | | T | C | H | C | M | N | | | E | |
| S2.23 | Y | H | K | | | T | C | H | C | M | | G | | E | |
| S2.24 | Y | H | K | | | T | C | H | C | M | | | P | E | |
| S2.25 | Y | H | K | | | T | C | H | | M | N | G | | E | |
| S2.26 | Y | H | K | | | T | C | H | | M | N | | P | E | |
| S2.27 | Y | H | K | | | T | C | H | | M | | G | P | E | |
| S2.28 | Y | H | K | W | G | T | C | H | C | M | | | | E | |
| S2.29 | Y | H | K | W | G | T | C | H | | M | N | | | E | |
| S2.30 | Y | H | K | W | G | T | C | H | | M | | G | | E | |
| S2.31 | Y | H | K | W | G | T | C | H | | M | | | P | E | |
| S2.32 | Y | H | K | W | G | T | C | H | | M | | | | E | E |
| S2.33 | Y | H | K | W | G | T | C | H | | M | | | | A | E |
| S2.34 | Y | H | K | W | | T | C | H | C | M | N | | | E | |
| S2.35 | Y | H | K | W | | T | C | H | C | M | | G | | E | |
| S2.36 | Y | H | K | W | | T | C | H | C | M | | | P | E | |
| S2.37 | Y | H | K | W | | T | C | H | C | M | | | | E | E |
| S2.38 | Y | H | K | W | | T | C | H | C | M | | | | A | E |
| S2.39 | Y | H | K | W | | T | C | H | | M | N | G | | E | |
| S2.40 | Y | H | K | W | | T | C | H | | M | N | | P | E | |
| S2.41 | Y | H | K | W | | T | C | H | | M | | G | P | E | |
| S2.42 | Y | H | K | W | | T | C | H | C | M | N | G | | E | |
| S2.43 | Y | H | K | W | | T | C | H | C | M | N | | P | E | |
| S2.44 | Y | H | K | W | | T | C | H | C | M | | G | P | E | |
| S2.45 | Y | H | K | W | G | T | C | H | C | M | N | | | E | |
| S2.46 | Y | H | K | W | G | T | C | H | C | M | | G | | E | |
| S2.47 | Y | H | K | W | G | T | C | H | C | M | | | P | E | |
| S2.48 | Y | H | K | W | G | T | C | H | C | M | | | | E | E |
| S2.49 | Y | H | K | W | G | T | C | H | C | M | | | | A | E |
| S2.50 | Y | H | K | W | G | T | C | H | C | M | N | G | | E | |
| S2.51 | Y | H | K | W | G | T | C | H | C | M | N | | P | E | |
| S2.52 | Y | H | K | W | G | T | C | H | C | M | | G | P | E | |
| S2.53 | Y | H | K | W | | T | C | H | C | M | N | G | P | E | E |
| S2.54 | Y | H | K | W | | T | C | H | C | M | N | G | P | A | E |
| S2.55 | Y | H | K | W | G | T | C | H | C | M | N | G | P | E | E |
| S2.56 | Y | H | K | W | G | T | C | H | C | M | N | G | P | A | E |

TABLE 6E
Hybrid constructs. Mutations are indicated with reference to TadA*7.10.

| | TadA amino acid subsitutions | | | | | | | | | | | |
|---|---|---|---|---|---|---|---|---|---|---|---|---|
| | 76 | 82 | 109 | 111 | 119 | 122 | 123 | 147 | 149 | 154 | 166 | 167 |
| | TadA*7.10 | | | | | | | | | | | |
| | I | V | A | T | D | H | Y | Y | F | Q | T | D |
| | TadA*8e | | | | | | | | | | | |
| | | | S | R | N | N | | D | Y | | I | N |
| | TadA*8.20 | | | | | | | | | | | |
| | Y | S | | | | | H | R | | R | | |
| | TadA*8.17 | | | | | | | | | | | |
| | | S | | | | | | | | R | | |
| pNMG-B878 | Y | S | | | | | H | D | | R | | |
| pNMG-B879 | Y | S | | | | | H | R | Y | R | | |
| pNMG-B880 | Y | S | | | | | H | R | | R | I | |
| pNMG-B881 | Y | S | | | | | H | R | | R | | N |
| pNMG-B882 | Y | S | | | | | H | D | Y | R | I | N |
| pNMG-B883 | Y | S | | R | N | | H | R | | R | | |
| pNMG-B884 | Y | S | S | R | N | N | H | R | | R | | |
| pNMG-B885 | Y | S | S | | | | H | R | | R | | |
| pNMG-B886 | Y | S | | R | | | H | R | | R | | |
| pNMG-B887 | Y | S | | | N | | H | R | | R | | |
| pNMG-B888 | Y | S | | | | N | H | R | | R | | |
| pNMG-B889 | Y | S | S | R | | | H | R | | R | | |
| pNMG-B890 | Y | S | | | N | N | H | R | | R | | |
| pNMG-B891 | Y | S | S | R | N | N | H | D | Y | R | I | N |

TABLE 6F
Base editor variants. Mutations are indicated with reference to TadA*8.19/8.20.

| | AA positions: | | | | | | | | | | | | |
|---|---|---|---|---|---|---|---|---|---|---|---|---|---|
| | 17 | 27 | 48 | 49 | 76 | 82 | 84 | 118 | 142 | 147 | 149 | 166 | 167 |
| | ABE8.19m/8.20m | | | | | | | | | | | | |
| | T | E | A | I | Y/I | S | F | M | A | Y | F | T | D |
| 1.1 + 8e(B879) | | H | | | I | | M | | | | Y | | |
| 1.2 + 8e(B879) | | H | | K | I | | | | | | Y | | |
| 1.12 + 8e(B879) | A | H | | M | I | | | L | | | Y | | |
| 1.17 + 8e(B879) | A | | G | | | T | | | E | | Y | | |
| 1.18 + 8e(B879) | | G | | | | | | | | | Y | | |
| 1.19 + 8e(B879) | | G | | N | | | | | | | Y | | |
| 1.1 + 8e(B882) | | H | | | I | | M | | | D | Y | I | N |
| 1.2 + 8e(B882) | | H | | K | I | | | | | D | Y | I | N |
| 1.12 + 8e(B882) | A | H | | M | I | | | L | | D | Y | I | N |
| 1.17 + 8e(B882) | A | | G | | | T | | | E | D | Y | I | N |
| 1.18 + 8e(B882) | | G | | | | | | | | D | Y | I | N |
| 1.19 + 8e(B882) | | G | | N | | | | | | D | Y | I | N |

[0234] A TadA-derived cytidine deaminase (e.g., TadA-CD), according to certain embodiments, comprises an amino acid sequence that is at least 80% identical, at least 85% identical, at least 90% identical, at least 95% identical, at least 98% identical, at least 99% identical, and at least 99.5% identical to the amino acid sequence of SEQ ID NO: 489, wherein residue 27 of SEQ ID NO: 489 is any amino acid expect for E (glutamic acid). TadA-CDs with other sequence homologies are also possible. For example, in certain embodiments, the TadA-derived cytidine deaminase (e.g., TadA-CD) comprises an amino acid sequence that is at least 80% identical, at least 85% identical, at least 90% identical, at least 95% identical, at least 98% identical, at least 99% identical, and at least 99.5% identical to the amino acid sequence of SEQ ID NO: 489, wherein residue 28 of SEQ ID NO: 489 is any amino acid expect for V (valine). In another exemplary embodiment, the TadA-derived cytidine deaminase is at least 80% identical, at least 85% identical, at least 90% identical, at least 95% identical, at least 98% identical, at least 99% identical, and at least 99.5% identical to the amino acid sequence of SEQ ID NO: 489, wherein residue 96 of SEQ ID NO: 489 is any amino acid expect for H (histidine). In another exemplary embodiment, the TadA-derived cytidine deaminase is at least 80% identical, at least 85% identical, at least 90% identical, at least 95% identical, at least 98% identical, at least 99% identical, and at least 99.5% identical to the amino acid sequence of SEQ ID NO: 489, wherein residue 26 of SEQ ID NO: 489 is any amino acid expect for R (arginine). In various embodiments, the TadA-derived cytidine deaminase comprises an alteration at one or more of positions 26, 27, 28, 48, 73, or 96 compared to SEQ ID NO: 489.

[0235] As will be appreciated by those of skill in the art, TadA-derived cytidine deaminases (e.g., TadA-CD) may comprise a plurality of mutations relative to the parent adenosine deaminase (e.g., TadA-8e). In some embodiments, the deaminase of the instant application (e.g., TadA-CD) comprises mutations at residues E27, V28, and H96. In some embodiments, the disclosed deaminase further comprises at least one mutation at a residue selected from R26, M61, Y73, 176, M151, Q154, and A158, in the amino acid sequence of SEQ ID NO: 489, or corresponding mutations in a homologous adenosine deaminase.

[0236] In some embodiments, the deaminase comprises at least one mutation selected from E27A, E27K, V28G, V28A, and H96N, and further comprises at least one mutation at a residue selected from R26G, M61I, Y73H, Y73S, Y73C, I76F, M151I, Q154R, Q154H, and A158S, in the amino acid sequence of SEQ ID NO: 489, or a corresponding mutation in a homologous adenosine deaminase. Other mutations are also possible. For example, in certain embodiments, the TadA-CD enzyme comprises mutations selected from E27A, V28G, and H96N, and further comprises at least one mutation selected from R26G, M61I, Y73H, Y73S, Y73C, I76F, M151I, Q154R, Q154H, and A158S, in the amino acid sequence of SEQ ID NO: 489, or corresponding mutations in a homologous adenosine deaminase.

[0237] Other exemplary embodiments may include (1) deaminases comprising mutations E27K, V28G, and H96N, and further comprising at least one mutation selected from R26G, M61I, Y73H, Y73S, Y73C, I76F, M151I, Q154R, Q154H, and A158S, in the amino acid sequence of SEQ ID NO: 489 or corresponding mutations in a homologous adenosine deaminase; (2) deaminases comprising mutations E27A, V28A, and H96N, and further comprising at least one mutation selected from R26G, M61I, Y73H, Y73S, Y73C, I76F, M151I, Q154R, Q154H, and A158S, in the amino acid sequence of SEQ ID NO: 489, or corresponding mutations in a homologous adenosine deaminase; (3) deaminases comprising mutations E27K, V28A, and H96N, and further comprising at least one mutation selected from R26G, M61I, Y73H, Y73S, Y73C, I76F, M151I, Q154R, Q154H, and A158S, in the amino acid sequence of SEQ ID NO: 489, or corresponding mutations in a homologous adenosine deaminase.

[0238] In some embodiments, the TadA-derived cytidine deaminases (TadA-CD) comprise at least two mutations at residues selected from R26, M61, Y73, 176, M151, Q154, and A158 (relative to a reference adenosine deaminase). In other embodiments, the TadA-CD comprises at least two mutations at residues selected from R26G, M61I, Y73H, I76F, M151I, Q154H, Q154R, and A158S.

[0239] In some embodiments, the addition of a V106W mutation improves the selectivity by suppressing A deamination to a greater extent than C deamination.

[0240] In some embodiments, a TadA-based dual editor comprises an adenosine deaminase variant comprising one, two, three, four, or five mutations selected from R26G, V28A, A48R, Y73S, and H96N (e.g., SEQ ID NO: 495).

[0241] As such, in some embodiments, provided herein are deaminases that comprise mutations at residues R26, V28, A48, and Y73 in the amino acid sequence of SEQ ID NO: 489, or corresponding mutations in a homologous adenosine deaminase. Further provided herein are deaminases that comprise mutations at residues R26, E27, V28, A48, and Y73 (e.g., further comprise a mutation at E27) in the amino acid sequence of SEQ ID NO: 489. In particular embodiments, these deaminases comprise the mutations R26G, V28A, A48R, Y73S, and H96N. In some embodiments, these deaminases comprise the mutations R26G, V28G, A48R, and Y73C.

[0242] TadA-CD variants may comprise at least one mutation selected from R26G, E27A, V28G, I76F, H96N, and M151I (e.g, TadA-CDa, SEQ ID NO: 490); R26G, E27A, V28G, I76F, H96N, and A158S (e.g, TadA-CDb, SEQ ID NO: 491); R26G, E27A, V28G, I76F, H96N, Q154R, and A158S (e.g, TadA-CDc, SEQ ID NO: 492); E27A, V28G, Y73H, H96N, Q154H, and A158S (e.g., TadA-CDd, SEQ ID NO: 493); R26G, V28A, A48R, Y73S, and H96N (e.g., TadA-CDe, SEQ ID NO: 494); V28A, A48R, and Y73S (e.g, TadA-CDf, SEQ ID NO: 495), and R26G, V28G, A48R, and Y73C (e.g, TadA-CDg, SEQ ID NO: 496).

[0243] In some preferred embodiments, the deaminase comprises the mutations R26G, E27A, V28G, I76F, H96N, and A158S (e.g., TadA-CDa, SEQ ID NO: 490), R26G, E27A, V28G, I76F, H96N, Q154R, and A158S (e.g., TadA-CDb, SEQ ID NO: 491), R26G, E27A, V28G, I76F, H96N, and M151I (e.g., TadA-CDc, SEQ ID NO: 492), E27K, V28A, M61I, and H96N (e.g., TadA-CDd, SEQ ID NO: 493), E27A, V28G, Y73H, H96N, Q154H, and A158S (e.g., TadA-CDe, SEQ ID NO: 494), R26G, V28A, A48R, Y73S, and H96N (e.g., TadA-CDf, SEQ ID NO: 495), and R26G, V28G, A48R, and Y73C (e.g., TadA-CDg, SEQ ID NO: 496).

[0244] In some embodiments, the TadA-CD variants described above and herein may also comprises a V106W mutation.

[0245] In some embodiments, the TadA-CD variants comprise at least 80%, at least 85%, at least 90%, at least 95%, at least 98%, at least 99%, or at least 99.5% to any of the amino acid sequences of SEQ ID NOs: 489-496.

[0246] In some embodiments, the evolved TadA-Dual deaminase comprises the mutations R26G, V28A, N46I, A48R, Y73P, and H96N (TadA-CD-1, SEQ ID NO: 497) relative to the amino acid sequence of SEQ ID NO: 489. In some embodiments, the evolved TadA-Dual deaminase comprises the mutations R26G, V28A, N46T, A48R, Y73P, and H96N (TadA-CD-2, SEQ ID NO: 498) relative to the amino acid sequence of SEQ ID NO: 489. In some embodiments, the evolved TadA-Dual deaminase comprises the mutations R26G, V28A, N46T, A48R, Y73S, and H96N (TadA-CD-3, SEQ ID NO: 499) relative to the amino acid sequence of SEQ ID NO: 489. In some embodiments, the evolved TadA-Dual deaminase comprises the mutations R26G, V28A, N46V, A48R, Y73S, and H96N (TadA-CD-4, SEQ ID NO:500) relative to the amino acid sequence of SEQ ID NO: 489. In some embodiments, the evolved TadA-Dual deaminase comprises the mutations R26G, V28A, N46V, A48R, Y73P, and H96N (TadA-CD-5, SEQ ID NO: 501) relative to the amino acid sequence of SEQ ID NO: 489. In some embodiments, the evolved TadA-Dual deaminase comprises the mutations R26G, V28A, N46L, A48R, Y73P, and H96N (TadA-CD-6, SEQ ID NO: 502) relative to the amino acid sequence of SEQ ID NO: 489. In some embodiments, the evolved TadA-Dual deaminase comprises the mutations V28A, N46L, A48P, and Y73P (TadA-CD-7, SEQ ID NO: 503) relative to the amino acid sequence of SEQ ID NO: 489. In some embodiments, the evolved TadA-Dual deaminase comprises the mutations V28A, N46C, A48P, and Y73P (TadA-CD-8, SEQ ID NO: 504) relative to the amino acid sequence of SEQ ID NO: 489. In some embodiments, the evolved TadA-Dual deaminase comprises the mutations R26G, V28A, N46V, A48R, Y73P, and H96N (TadA-CD-9, SEQ ID NO: 505) relative to the amino acid sequence of SEQ ID NO: 489. In some embodiments, the evolved TadA-Dual deaminase comprises the mutations R26G, V28A, N46V, A48R, Q71H, Y73P, and H96N (TadA-CD-10, SEQ ID NO: 506) relative to the amino acid sequence of SEQ ID NO: 489. In some embodiments, the evolved TadA-Dual deaminase comprises the mutations R26G, V28A, N46L, A48R, Y73P, and H96N (TadA-CD-11, SEQ ID NO: 507) relative to the amino acid sequence of SEQ ID NO: 489. In some embodiments, the evolved TadA-Dual deaminase comprises the mutations R26G, V28A, N46C, A48R, Y73P, and H96N (TadA-CD-12, SEQ ID NO: 508) relative to the amino acid sequence of SEQ ID NO: 489. In some embodiments, the evolved TadA-Dual deaminase comprises the mutations R26G, V28A, N46C, A48R, Y73P, H96N, and A162V (TadA-CD-13, SEQ ID NO: 509) relative to the amino acid sequence of SEQ ID NO: 489.

[0247] In some embodiments, the evolved TadA-Dual deaminase comprises the mutations R26G, V28A, N46I, A48R, Y73S, and H96N (TadA-CD-14, SEQ ID NO: 510) relative to the amino acid sequence of SEQ ID NO: 489. In some embodiments, the evolved TadA-Dual deaminase comprises the mutations R26G, V28A, A48R, Q71S, Y73S, and H96N (TadA-CD-15, SEQ ID NO: 511) relative to the amino acid sequence of SEQ ID NO: 489. In some embodiments, the evolved TadA-Dual deaminase comprises the mutations R26G, V28A, N46L, A48R, and Y73P (TadA-CD-16, SEQ ID NO: 512) relative to the amino acid sequence of SEQ ID NO: 489. In some embodiments, the evolved TadA-Dual deaminase comprises the mutations R26G, V28A, N46L, A48R, Y73P, and H96N (TadA-CD-17, SEQ ID NO: 513) relative to the amino acid sequence of SEQ ID NO: 489. In some embodiments, the evolved TadA-Dual deaminase comprises the mutations R26G, V28A, Y73P, and H96N (TadA-CD-18, SEQ ID NO: 514) relative to the amino acid sequence of SEQ ID NO: 489. In some embodiments, the evolved TadA-Dual deaminase comprises the mutations R26G, V28A, N46V, A48R, Y73S, and H96N (TadA-CD-19, SEQ ID NO: 515) relative to the amino acid sequence of SEQ ID NO: 489. In some embodiments, the evolved TadA-Dual deaminase comprises the mutations R26G, V28A, N46V, A48R, Y73P, and H96N (TadA-CD-20, SEQ ID NO: 516) relative to the amino acid sequence of SEQ ID NO: 489. In some embodiments, the evolved TadA-Dual deaminase comprises the mutations R26G and N46L (TadA-CD-21, SEQ ID NO: 517) relative to the amino acid sequence of SEQ ID NO: 489. In some embodiments, the evolved TadA-Dual deaminase comprises the mutations R26G, V28A, N46I, A48R, Y73P, and H96N (TadA-CD-22, SEQ ID NO: 518) relative to the amino acid sequence of SEQ ID NO: 489. In some embodiments, the evolved TadA-Dual deaminase comprises the mutations R26G, V28A, N46V, A48R, Y73P, and H96N (TadA-CD-23, SEQ ID NO: 519) relative to the amino acid sequence of SEQ ID NO: 489. In some embodiments, the evolved TadA-Dual deaminase comprises the mutations R26G, V28A, A48P, Y73H, T79P, and H96N (TadA-CD-24, SEQ ID NO: 520) relative to the amino acid sequence of SEQ ID NO: 489. In some embodiments, the evolved TadA-Dual deaminase comprises the mutations R26G, N46I, and H96N (TadA-CD-25, SEQ ID NO: 521) relative to the amino acid sequence of SEQ ID NO: 489.

[0248] In some embodiments, the evolved TadA-Dual deaminase comprises the mutations R26G, V28A, N46V, A48R, Y73P, and H96N (TadA-CD-26, SEQ ID NO: 522) relative to the amino acid sequence of SEQ ID NO: 489. In some embodiments, the evolved TadA-Dual deaminase comprises the mutations R26G, V28A, N46L, A48R, Y73S, and H96N (TadA-CD-27, SEQ ID NO: 523) relative to the amino acid sequence of SEQ ID NO: 489. In some embodiments, the evolved TadA-Dual deaminase comprises the mutations R26G, V28A, N46C, A48R, H96N, and A162V (TadA-CD-28, SEQ ID NO: 524) relative to the amino acid sequence of SEQ ID NO: 489. In some embodiments, the evolved TadA-Dual deaminase comprises the mutations R26G, V28A, N46V, A48R, Q71H, Y73P, and H96N (TadA-CD-29, SEQ ID NO: 525) relative to the amino acid sequence of SEQ ID NO: 489. In some embodiments, the evolved TadA-Dual deaminase comprises the mutations R26G, V28A, N46C, A48R, Y73P, and H96N (TadA-CD-30, SEQ ID NO: 526) relative to the amino acid sequence of SEQ ID NO: 489. In some embodiments, the evolved TadA-Dual deaminase comprises the mutations R26G, V28A, N46C, A48R, Y73P, H96N, and A162V (TadA-CD-31, SEQ ID NO: 527) relative to the amino acid sequence of SEQ ID NO: 489.

[0249] In some embodiments, the evolved TadA-Dual deaminase comprises the mutations R26G, V28A, N46V, A48R, Y73P, and H96N (TadA-CD-32, SEQ ID NO: 528) relative to the amino acid sequence of SEQ ID NO: 489. In some embodiments, the evolved TadA-Dual deaminase comprises the mutations R26G, V28A, N46V, A48R, Y73S, and H96N (TadA-CD-33, SEQ ID NO: 529) relative to the amino acid sequence of SEQ ID NO: 489. In some embodiments, the evolved TadA-Dual deaminase comprises the mutations R26G, V28A, N46V, A48P, Y73S, and H96N (TadA-CD-34, SEQ ID NO: 530) relative to the amino acid sequence of SEQ ID NO: 489. In some embodiments, the evolved TadA-Dual deaminase comprises the mutations R26G, V28A, N46C, A48R, Y73P, and H96N (TadA-CD-35, SEQ ID NO: 531) relative to the amino acid sequence of SEQ ID NO: 489. In some embodiments, the evolved TadA-Dual deaminase comprises the mutations R26G, V28A, L34M, N46L, A48R, Y73P, and H96N (TadA-CD-36, SEQ ID NO: 532) relative to the amino acid sequence of SEQ ID NO: 489. In some embodiments, the evolved TadA-Dual deaminase comprises the mutations R26G, V28A, N46L, A48R, Y73P, and H96N (TadA-CD-37, SEQ ID NO: 533) relative to the amino acid sequence of SEQ ID NO: 489. In some embodiments, the evolved TadA-Dual deaminase comprises the mutations R26G, V28A, N46L, A48P, R64K, Y73P, and H96N (TadA-CD-38, SEQ ID NO: 534) relative to the amino acid sequence of SEQ ID NO: 489.

[0250] In some embodiments, the evolved TadA-Dual deaminase comprises the mutations N46I, S73P, and H154Q (TadA-CD-1, SEQ ID NO: 497) relative to the amino acid sequence of SEQ ID NO: 495. In some embodiments, the evolved TadA-Dual deaminase comprises the mutations N46T (TadA-CD-2, SEQ ID NO: 498) relative to the amino acid sequence of SEQ ID NO: 495. In some embodiments, the evolved TadA-Dual deaminase comprises the mutations N46T and H154Q (TadA-CD-3, SEQ ID NO: 499) relative to the amino acid sequence of SEQ ID NO: 495. In some embodiments, the evolved TadA-Dual deaminase comprises the mutations N46V and H154Q (TadA-CD-4, SEQ ID NO: 500) relative to the amino acid sequence of SEQ ID NO: 495. In some embodiments, the evolved TadA-Dual deaminase comprises the mutations N46V, S73P, G105S, and H154Q (TadA-CD-5, SEQ ID NO: 501) relative to the amino acid sequence of SEQ ID NO: 495. In some embodiments, the evolved TadA-Dual deaminase comprises the mutations N46L, S73P, and H154Q (TadA-CD-6, SEQ ID NO: 502) relative to the amino acid sequence of SEQ ID NO: 495. In some embodiments, the evolved TadA-Dual deaminase comprises the mutations G26R N46L, R48P, S73P, N96H, and H154Q (TadA-CD-7, SEQ ID NO: 503) relative to the amino acid sequence of SEQ ID NO: 495. In some embodiments, the evolved TadA-Dual deaminase comprises the mutations N46C, N96H, and H154Q (TadA-CD-8, SEQ ID NO: 504) relative to the amino acid sequence of SEQ ID NO: 495. In some embodiments, the evolved TadA-Dual deaminase comprises the mutations N46V, S73P, and H154Q (TadA-CD-9, SEQ ID NO: 505) relative to the amino acid sequence of SEQ ID NO: 495. In some embodiments, the evolved TadA-Dual deaminase comprises the mutations N46V, Q71H, S73P, and H154Q (TadA-CD-10, SEQ ID NO: 506) relative to the amino acid sequence of SEQ ID NO: 495. In some embodiments, the evolved TadA-Dual deaminase comprises the mutations N46L and H154Q (TadA-CD-11, SEQ ID NO: 507) relative to the amino acid sequence of SEQ ID NO: 495. In some embodiments, the evolved TadA-Dual deaminase comprises the mutations N46C, S73P, and H154Q (TadA-CD-12, SEQ ID NO: 508) relative to the amino acid sequence of SEQ ID NO: 495. In some embodiments, the evolved TadA-Dual deaminase comprises the mutations N46C, S73P, H154Q, and A162V (TadA-CD-13, SEQ ID NO: 509) relative to the amino acid sequence of SEQ ID NO: 495.

[0251] In some embodiments, the evolved TadA-Dual deaminase comprises the mutations N46I and H154Q (TadA-CD-14, SEQ ID NO: 510) relative to the amino acid sequence of SEQ ID NO: 495. In some embodiments, the evolved TadA-Dual deaminase comprises the mutations Q71S and H154Q (TadA-CD-15, SEQ ID NO: 511) relative to the amino acid sequence of SEQ ID NO: 489. In some embodiments, the evolved TadA-Dual deaminase comprises the mutations N46L, S73P, N79T, and N96H (TadA-CD-16, SEQ ID NO: 512) relative to the amino acid sequence of SEQ ID NO: 495. In some embodiments, the evolved TadA-Dual deaminase comprises the mutations N46L, S73P, N79T (TadA-CD-17, SEQ ID NO: 513) relative to the amino acid sequence of SEQ ID NO: 495. In some embodiments, the evolved TadA-Dual deaminase comprises the mutations R48A, S73P, and N79T (TadA-CD-18, SEQ ID NO: 514) relative to the amino acid sequence of SEQ ID NO: 495. In some embodiments, the evolved TadA-Dual deaminase comprises the mutations N46V and N79T (TadA-CD-19, SEQ ID NO: 515) relative to the amino acid sequence of SEQ ID NO: 495. In some embodiments, the evolved TadA-Dual deaminase comprises the mutations N46V, S73P, and N79T (TadA-CD-20, SEQ ID NO: 516) relative to the amino acid sequence of SEQ ID NO: 495. In some embodiments, the evolved TadA-Dual deaminase comprises the mutations A28V, N46L, R48A, S73Y, N79T, and N96H (TadA-CD-21, SEQ ID NO: 517) relative to the amino acid sequence of SEQ ID NO: 495. In some embodiments, the evolved TadA-Dual deaminase comprises the mutations N46I, S73P, and N79T (TadA-CD-22, SEQ ID NO: 518) relative to the amino acid sequence of SEQ ID NO: 495. In some embodiments, the evolved TadA-Dual deaminase comprises the mutations N46V, S73P, N79T, and G106S (TadA-CD-23, SEQ ID NO: 519) relative to the amino acid sequence of SEQ ID NO: 495. In some embodiments, the evolved TadA-Dual deaminase comprises the mutations R48P, S73H, and N79P (TadA-CD-24, SEQ ID NO: 520) relative to the amino acid sequence of SEQ ID NO: 495. In some embodiments, the evolved TadA-Dual deaminase comprises the mutations A28V, N46I, R48A, S73Y, and N79T (TadA-CD-25, SEQ ID NO: 521) relative to the amino acid sequence of SEQ ID NO: 495.

[0252] In some embodiments, the evolved TadA-Dual deaminase comprises the mutations N46V and S73P (TadA-CD-26, SEQ ID NO: 522) relative to the amino acid sequence of SEQ ID NO: 495. In some embodiments, the evolved TadA-Dual deaminase comprises the mutation N46L (TadA-CD-27, SEQ ID NO: 523) relative to the amino acid sequence of SEQ ID NO: 495. In some embodiments, the evolved TadA-Dual deaminase comprises the mutations N46C, S73Y, and A162V (TadA-CD-28, SEQ ID NO: 524) relative to the amino acid sequence of SEQ ID NO: 495. In some embodiments, the evolved TadA-Dual deaminase comprises the mutations N46V, Q71H, and S73P (TadA-CD-29, SEQ ID NO: 525) relative to the amino acid sequence of SEQ ID NO: 495. In some embodiments, the evolved TadA-Dual deaminase comprises the mutations N46C and S73P (TadA-CD-30, SEQ ID NO: 526) relative to the amino acid sequence of SEQ ID NO: 495. In some embodiments, the evolved TadA-Dual deaminase comprises the mutations N46C, S73P, and A162V (TadA-CD-31, SEQ ID NO: 527) relative to the amino acid sequence of SEQ ID NO: 495. In some embodiments, the evolved TadA-Dual deaminase comprises the mutations N46V and S73P (TadA-CD-32, SEQ ID NO: 528) relative to the amino acid sequence of SEQ ID NO: 495. In some embodiments, the evolved TadA-Dual deaminase comprises the mutation N46V (TadA-CD-33, SEQ ID NO: 529) relative to the amino acid sequence of SEQ ID NO: 495. In some embodiments, the evolved TadA-Dual deaminase comprises the mutations N46V and R48P (TadA-CD-34, SEQ ID NO: 530) relative to the amino acid sequence of SEQ ID NO: 495. In some embodiments, the evolved TadA-Dual deaminase comprises the mutations N46CV and S73P (TadA-CD-35, SEQ ID NO: 531) relative to the amino acid sequence of SEQ ID NO: 495. In some embodiments, the evolved TadA-Dual deaminase comprises the mutations L34M, N46L and S73P (TadA-CD-36, SEQ ID NO: 532) relative to the amino acid sequence of SEQ ID NO: 495. In some embodiments, the evolved TadA-Dual deaminase comprises the mutations N46L and S73P (TadA-CD-37, SEQ ID NO: 533) relative to the amino acid sequence of SEQ ID NO: 495. In some embodiments, the evolved TadA-Dual deaminase comprises the mutations N46L, r48P, R64K and S73P (TadA-CD-38, SEQ ID NO: 534) relative to the amino acid sequence of SEQ ID NO: 495.

[0253] In some embodiments, the TadA-CDs evolved from TadA-dual comprise at least 80%, 85%, 90%, 95%, 98%, 99%, or 99.5% identical to any of the amino acid sequences of SEQ ID NOs: 39, 41-54, and 359-383.

[0254] Exemplary TadA-derived cytosine base editor amino acid sequences include: TadA-CDa base editor (SpCas9n napDNAbp domain) (TadCBEa) (SEQ ID NO: 535), TadA-CDb base editor (SpCas9n napDNAbp domain) (TadCBEb) (SEQ ID NO: 536), TadA-CDc base editor (SpCas9n napDNAbp domain) (TadCBEc) (SEQ ID NO: 537), TadA-CDd base editor (SpCas9n napDNAbp domain) (TadCBEd) (SEQ ID NO: 538), TadA-CDe base editor (SpCas9n napDNAbp domain) (TadCBEe) (SEQ ID NO: 539), TadA-CDa (V106W) base editor (SpCas9n napDNAbp domain) (TadCBEa (V106W)) (SEQ ID NO: 540), TadA-CDd (V106W) base editor (SpCas9n napDNAbp domain) (TadCBEd (V106W)) (SEQ ID NO: 541), TadA-CDf base editor (SpCas9n napDNAbp domain) (TadCBEf) (SEQ ID NO: 542), TadA-CDg base editor (SpCas9n napDNAbp domain) (TadCBEg) (SEQ ID NO: 543), TadA-CDa: eNme2Cas9 base editor (SEQ ID NO: 544), TadA-CDa: SaCas9 base editor (SEQ ID NO: 545), TadA-CDa: SpCas9-NG base editor (SEQ ID NO: 546), TadA-CDa: enCjCas9 base editor (SEQ ID NO: 547).

[0255] Exemplary polynucleotides encoding TadA-derived cytosine base editors of the disclosure include: TadCBEa-eNme2-C-BE4max vector (SEQ ID NO: 548), TadCBEa-enCjCas9-BE4max vector (SEQ ID NO: 549), TadCBEa-SpCas9-BE4max vector (SEQ ID NO: 550), TadCBEa-SaCas9-BE4max vector (SEQ ID NO: 551), TadCBEa-SpCas9-NG-BE4max vector (SEQ ID NO: 552).

### Guide Polynucleotides

[0256] A polynucleotide programmable nucleotide binding domain, when in conjunction with a bound guide polynucleotide (e.g., gRNA), can specifically bind to a target polynucleotide sequence (i.e., via complementary base pairing between bases of the bound guide nucleic acid and bases of the target polynucleotide sequence) and thereby localize the base editor to the target nucleic acid sequence desired to be edited. In some embodiments, the target polynucleotide sequence comprises single-stranded DNA or double-stranded DNA. In some embodiments, the target polynucleotide sequence comprises RNA. In some embodiments, the target polynucleotide sequence comprises a DNA-RNA hybrid.

[0257] In an embodiment, a guide polynucleotide described herein can be RNA or DNA. In one embodiment, the guide polynucleotide is a gRNA.

[0258] In some embodiments, the guide polynucleotide is at least one single guide RNA (“sgRNA” or “gRNA”). In some embodiments, a guide polynucleotide comprises two or more individual polynucleotides, which can interact with one another via for example complementary base pairing (e.g., a dual guide polynucleotide, dual gRNA). For example, a guide polynucleotide can comprise a CRISPR RNA (crRNA) and a trans-activating CRISPR RNA (tracrRNA) or can comprise one or more trans-activating CRISPR RNA (tracrRNA).

[0259] A guide polynucleotide may include natural or non-natural (or unnatural) nucleotides (e.g., peptide nucleic acid or nucleotide analogs). In some cases, the targeting region of a guide nucleic acid sequence (e.g., a spacer) can be at least 15, 16, 17, 18, 19, 20, 21, 22, 23, 24, 25, 26, 27, 28, 29, or 30 nucleotides in length.

[0260] In some embodiments, the methods described herein can utilize an engineered Cas protein. A guide RNA (gRNA) is a short synthetic RNA composed of a scaffold sequence necessary for Cas-binding and a user-defined ~20 nucleotide spacer that defines the genomic target to be modified. Exemplary gRNA scaffold sequences are provided in the sequence listing as SEQ ID NOs: 317-327 and 425. Thus, a skilled artisan can change the genomic target of the Cas protein specificity is partially determined by how specific the gRNA targeting sequence is for the genomic target compared to the rest of the genome. In embodiments, the spacer is about 10, 11, 12, 13, 14, 15, 16, 17, 18, 19, 20, 22, 23, 24, 25, or more nucleotides in length. The spacer of a gRNA can be or can be about 19, 20, or 21 nucleotides in length.

[0261] A gRNA or a guide polynucleotide can target any exon or intron of a gene target. In some embodiments, a composition comprises multiple gRNAs that all target the same exon or multiple gRNAs that target different exons. An exon and/or an intron of a gene can be targeted. A gRNA or a guide polynucleotide can target a nucleic acid sequence of about 20 nucleotides or less than about 20 nucleotides (e.g., at least about 5, 10, 15, 16, 17, 18, 19, 20, 21, 22, 23, 24, 25, 30 nucleotides), or anywhere between about 1-100 nucleotides (e.g., 5, 10, 15, 16, 17, 18, 19, 20, 21, 22, 23, 24, 25, 30, 40, 50, 60, 70, 80, 90, 100). A target nucleic acid sequence can be or can be about 20 bases immediately 5′ of the first nucleotide of the PAM. A gRNA can target a nucleic acid sequence. A target nucleic acid can be at least or at least about 1-10, 1-20, 1-30, 1-40, 1-50, 1-60, 1-70, 1-80, 1-90, or 1-100 nucleotides.

[0262] The guide polynucleotides can comprise standard ribonucleotides, modified ribonucleotides (e.g., pseudouridine), ribonucleotide isomers, and/or ribonucleotide analogs.

[0263] In some embodiments, a base editor system may comprise multiple guide polynucleotides, e.g., gRNAs. For example, the gRNAs may target to one or more target loci (e.g., at least 1 gRNA, at least 2 gRNA, at least 5 gRNA, at least 10 gRNA, at least 20 gRNA, at least 30 g RNA, at least 50 gRNA) comprised in a base editor system. The multiple gRNA sequences can be tandemly arranged and may be separated by a direct repeat.

### Modified Polynucleotides

[0264] To enhance expression, stability, and/or genomic/base editing efficiency, and/or reduce possible toxicity, the base editor-coding sequence (e.g., mRNA) and/or the guide polynucleotide (e.g., gRNA) can be modified to include one or more modified nucleotides and/or chemical modifications, e.g. using pseudo-uridine, 5-Methyl-cytosine, 2′-O-methyl-3′-phosphonoacetate, 2′-O-methyl thioPACE (MSP), 2′-O-methyl-PACE (MP), 2′-fluoro RNA (2′-F-RNA), =constrained ethyl (S-cEt), 2′-O-methyl (‘M’), 2′-O-methyl-3′-phosphorothioate (‘MS’), 2′-O-methyl-3′-thiophosphonoacetate (‘MSP’), 5-methoxyuridine, phosphorothioate, and N1-Methylpseudouridine. Chemically protected gRNAs can enhance stability and editing efficiency in vivo and ex vivo. Methods for using chemically modified mRNAs and guide RNAs are known in the art and described, for example, by Jiang et al., Chemical modifications of adenine base editor mRNA and guide RNA expand its application scope. Nat Commun 11, 1979 (2020). doi.org/10.1038/s41467-020-15892-8, Callum et al., N1-Methylpseudouridine substitution enhances the performance of synthetic mRNA switches in cells, Nucleic Acids Research, Volume 48, Issue 6, 6 Apr. 2020, Page e35, and Andries et al., Journal of Controlled Release, Volume 217, 10 Nov. 2015, Pages 337-344, each of which is incorporated herein by reference in its entirety.

[0265] In some embodiments, the guide polynucleotide comprises one or more modified nucleotides at the 5′ end and/or the 3′ end of the guide. In some embodiments, the guide polynucleotide comprises two, three, four or more modified nucleosides at the 5′ end and/or the 3′ end of the guide. In some embodiments, the guide polynucleotide comprises two, three, four or more modified nucleosides at the 5′ end and/or the 3′ end of the guide.

[0266] In some embodiments, the guide comprises at least about 50%-75% modified nucleotides. In some embodiments, the guide comprises at least about 85% or more modified nucleotides. In some embodiments, at least about 1-5 nucleotides at the 5′ end of the gRNA are modified and at least about 1-5 nucleotides at the 3′ end of the gRNA are modified. In some embodiments, at least about 3-5 contiguous nucleotides at each of the 5′ and 3′ termini of the gRNA are modified. In some embodiments, at least about 20% of the nucleotides present in a direct repeat or anti-direct repeat are modified. In some embodiments, at least about 50% of the nucleotides present in a direct repeat or anti-direct repeat are modified. In some embodiments, at least about 50-75% of the nucleotides present in a direct repeat or anti-direct repeat are modified. In some embodiments, at least about 100 of the nucleotides present in a direct repeat or anti-direct repeat are modified. In some embodiments, at least about 20% or more of the nucleotides present in a hairpin present in the gRNA scaffold are modified. In some embodiments, at least about 50% or more of the nucleotides present in a hairpin present in the gRNA scaffold are modified. In some embodiments, the guide comprises a variable length spacer. In some embodiments, the guide comprises a 20-40 nucleotide spacer. In some embodiments, the guide comprises a spacer comprising at least about 20-25 nucleotides or at least about 30-35 nucleotides. In some embodiments, the spacer comprises modified nucleotides. In some embodiments, the guide comprises two or more of the following:
[0267] at least about 1-5 nucleotides at the 5′ end of the gRNA are modified and at least about 1-5 nucleotides at the 3′ end of the gRNA are modified;
[0268] at least about 20% of the nucleotides present in a direct repeat or anti-direct repeat are modified;
[0269] at least about 50-75% of the nucleotides present in a direct repeat or anti-direct repeat are modified;
[0270] at least about 20% or more of the nucleotides present in a hairpin present in the gRNA scaffold are modified;
[0271] a variable length spacer; and
[0272] a spacer comprising modified nucleotides.

[0273] In embodiments, the gRNA contains numerous modified nucleotides and/or chemical modifications. Such modifications can increase base editing ~2 fold in vivo or in vitro. In embodiments, the gRNA comprises 2′-O-methyl or phosphorothioate modifications. In an embodiment, the gRNA comprises 2′-O-methyl and phosphorothioate modifications. In an embodiment, the modifications increase base editing by at least about 2 fold.

[0274] A guide polynucleotide can comprise one or more modifications to provide a nucleic acid with a new or enhanced feature. A guide polynucleotide can comprise a nucleic acid affinity tag. A guide polynucleotide can comprise synthetic nucleotide, synthetic nucleotide analog, nucleotide derivatives, and/or modified nucleotides.

[0275] A gRNA or a guide polynucleotide can also be modified by 5′ adenylate, 5′ guanosine-triphosphate cap, 5′ N7-Methylguanosine-triphosphate cap, 5′ triphosphate cap, 3′ phosphate, 3′ thiophosphate, 5′ phosphate, 5′ thiophosphate, Cis-Syn thymidine dimer, trimers, C12 spacer, C3 spacer, C6 spacer, dSpacer, PC spacer, rSpacer, Spacer 18, Spacer 9, 3′-3′ modifications, 2′-O-methyl thioPACE (MSP), 2′-O-methyl-PACE (MP), and constrained ethyl (S-cEt), 5′-5′ modifications, abasic, acridine, azobenzene, biotin, biotin BB, biotin TEG, cholesteryl TEG, desthiobiotin TEG, DNP TEG, DNP-X, DOTA, dT-Biotin, dual biotin, PC biotin, psoralen C2, psoralen C6, TINA, 3′ DABCYL, black hole quencher 1, black hole quencher 2, DABCYL SE, dT-DABCYL, IRDye QC-1, QSY-21, QSY-35, QSY-7, QSY-9, carboxyl linker, thiol linkers, 2′-deoxyribonucleoside analog purine, 2′-deoxyribonucleoside analog pyrimidine, ribonucleoside analog, 2′-O-methyl ribonucleoside analog, sugar modified analogs, wobble/universal bases, fluorescent dye label, 2′-fluoro RNA, 2′-O-methyl RNA, methylphosphonate, phosphodiester DNA, phosphodiester RNA, phosphothioate DNA, phosphorothioate RNA, UNA, pseudouridine-5′-triphosphate, 5′-methylcytidine-5′-triphosphate, or any combination thereof.

[0276] In some cases, a phosphorothioate enhanced RNA gRNA can inhibit RNase A, RNase T1, calf serum nucleases, or any combinations thereof. These properties can allow the use of PS-RNA gRNAs to be used in applications where exposure to nucleases is of high probability in vivo or in vitro. For example, phosphorothioate (PS) bonds can be introduced between the last 3-5 nucleotides at the 5′- or 3′-end of a gRNA which can inhibit exonuclease degradation. In some cases, phosphorothioate bonds can be added throughout an entire gRNA to reduce attack by endonucleases.

### Fusion Proteins or Complexes Comprising a Nuclear Localization Sequence (NLS)

[0277] In some embodiments, the fusion proteins or complexes provided herein further comprise one or more (e.g., 2, 3, 4, 5) nuclear targeting sequences, for example a nuclear localization sequence (NLS). In one embodiment, a bipartite NLS is used. In some embodiments, a NLS comprises an amino acid sequence that facilitates the importation of a protein, that comprises an NLS, into the cell nucleus (e.g., by nuclear transport). In some embodiments, the NLS is fused to the N-terminus or the C-terminus of the fusion protein. In some embodiments, the NLS is fused to the C-terminus or N-terminus of an nCas9 domain or a dCas9 domain. In some embodiments, the NLS is fused to the N-terminus or C-terminus of the Cas12 domain. In some embodiments, the NLS is fused to the N-terminus or C-terminus of the cytidine or adenosine deaminase. In some embodiments, the NLS is fused to the fusion protein via one or more linkers. In some embodiments, the NLS is fused to the fusion protein without a linker. In some embodiments, the NLS comprises an amino acid sequence of any one of the NLS sequences provided or referenced herein. Additional nuclear localization sequences are known in the art and would be apparent to the skilled artisan. For example, NLS sequences are described in Plank et al., PCT/EP2000/011690, the contents of which are incorporated herein by reference for their disclosure of exemplary nuclear localization sequences.

[0278] In some embodiments, the NLS is present in a linker or the NLS is flanked by linkers, for example described herein. A bipartite NLS comprises two basic amino acid clusters, which are separated by a relatively short spacer sequence (hence bipartite-2 parts, while monopartite NLSs are not). The NLS of nucleoplasmin, KR [PAATKKAGQA] KKKK (SEQ ID NO: 191), is the prototype of the ubiquitous bipartite signal: two clusters of basic amino acids, separated by a spacer of about 10 amino acids. The sequence of an exemplary bipartite NLS follows: PKKKRKVEGADKRTADGSEFESPKKKRKV (SEQ ID NO: 328).

[0279] In some embodiments, any of the fusion proteins or complexes provided herein comprise an NLS comprising the amino acid sequence EGADKRTADGSEFESPKKKRKV (amino acids 8 to 29 of SEQ ID NO 328). In some embodiments, any of the adenosine base editors provided herein comprise an NLS comprising the amino acid sequence EGADKRTADGSEFESPKKKRKV (amino acids 8 to 29 of SEQ ID NO: 328). In some embodiments, the NLS is at a C-terminal portion of the adenosine base editor. In some embodiments, the NLS is at the C-terminus of the adenosine base editor.

### Additional Domains

[0280] A base editor described herein can include any domain which helps to facilitate the nucleobase editing, modification or altering of a nucleobase of a polynucleotide. In some embodiments, a base editor comprises a polynucleotide programmable nucleotide binding domain (e.g., Cas9), a nucleobase editing domain (e.g., deaminase domain), and one or more additional domains. In some embodiments, the additional domain can facilitate enzymatic or catalytic functions of the base editor, binding functions of the base editor, or be inhibitors of cellular machinery (e.g., enzymes) that could interfere with the desired base editing result. In some embodiments, a base editor comprises a nuclease, a nickase, a recombinase, a deaminase, a methyltransferase, a methylase, an acetylase, an acetyltransferase, a transcriptional activator, or a transcriptional repressor domain.

[0281] In some embodiments, a base editor comprises an uracil glycosylase inhibitor (UGI) domain. In some cases, a base editor is expressed in a cell in trans with a UGI polypeptide. In some embodiments, cellular DNA repair response to the presence of U:G heteroduplex DNA can be responsible for a reduction in nucleobase editing efficiency in cells. In such embodiments, uracil DNA glycosylase (UDG) can catalyze removal of U from DNA in cells, which can initiate base excision repair (BER), mostly resulting in reversion of the U:G pair to a C:G pair. In such embodiments, BER can be inhibited in base editors comprising one or more domains that bind the single strand, block the edited base, inhibit UGI, inhibit BER, protect the edited base, and/or promote repairing of the non-edited strand. Thus, this disclosure contemplates a base editor fusion protein or complex comprising a UGI domain and/or a uracil stabilizing protein (USP) domain.

### Base Editor System

[0282] Provided herein are systems, compositions, and methods for editing a nucleobase using a base editor system. In some embodiments, the base editor system comprises (1) a base editor (BE) comprising a polynucleotide programmable nucleotide binding domain and a nucleobase editing domain (e.g., a deaminase domain) for editing the nucleobase; and (2) a guide polynucleotide (e.g., guide RNA) in conjunction with the polynucleotide programmable nucleotide binding domain. In some embodiments, the base editor system is a cytidine base editor (CBE) or an adenosine base editor (ABE). In some embodiments, the polynucleotide programmable nucleotide binding domain is a polynucleotide programmable DNA or RNA binding domain. In some embodiments, the nucleobase editing domain is a deaminase domain. In some embodiments, a deaminase domain can be a cytidine deaminase or an cytosine deaminase. In some embodiments, a deaminase domain can be an adenine deaminase or an adenosine deaminase. In some embodiments, the adenosine base editor can deaminate adenine in DNA. In some embodiments, the base editor is capable of deaminating a cytidine in DNA.

[0283] Use of the base editor system provided herein comprises the steps of: (a) contacting a target nucleotide sequence of a polynucleotide (e.g., double- or single stranded DNA or RNA) of a subject with a base editor system comprising a nucleobase editor (e.g., an adenosine base editor or a cytidine base editor) and a guide polynucleotide (e.g., gRNA), wherein the target nucleotide sequence comprises a targeted nucleobase pair; (b) inducing strand separation of said target region; (c) converting a first nucleobase of said target nucleobase pair in a single strand of the target region to a second nucleobase; and (d) cutting no more than one strand of said target region, where a third nucleobase complementary to the first nucleobase base is replaced by a fourth nucleobase complementary to the second nucleobase. It should be appreciated that in some embodiments, step (b) is omitted. In some embodiments, said targeted nucleobase pair is a plurality of nucleobase pairs in one or more genes. In some embodiments, the base editor system provided herein is capable of multiplex editing of a plurality of nucleobase pairs in one or more genes. In some embodiments, the plurality of nucleobase pairs is located in the same gene. In some embodiments, the plurality of nucleobase pairs is located in one or more genes, wherein at least one gene is located in a different locus.

[0284] The components of a base editor system (e.g., a deaminase domain, a guide RNA, and/or a polynucleotide programmable nucleotide binding domain) may be associated with each other covalently or non-covalently. For example, in some embodiments, the deaminase domain can be targeted to a target nucleotide sequence by a polynucleotide programmable nucleotide binding domain, optionally where the polynucleotide programmable nucleotide binding domain is complexed with a polynucleotide (e.g., a guide RNA). In some embodiments, a polynucleotide programmable nucleotide binding domain can be fused or linked to a deaminase domain. In some embodiments, a polynucleotide programmable nucleotide binding domain can target a deaminase domain to a target nucleotide sequence by non-covalently interacting with or associating with the deaminase domain. For example, in some embodiments, the nucleobase editing component (e.g., the deaminase component) comprises an additional heterologous portion or domain that is capable of interacting with, associating with, or capable of forming a complex with a corresponding heterologous portion, antigen, or domain that is part of a polynucleotide programmable nucleotide binding domain and/or a guide polynucleotide (e.g., a guide RNA) complexed therewith. In some embodiments, the polynucleotide programmable nucleotide binding domain, and/or a guide polynucleotide (e.g., a guide RNA) complexed therewith, comprises an additional heterologous portion or domain that is capable of interacting with, associating with, or capable of forming a complex with a corresponding heterologous portion, antigen, or domain that is part of a nucleobase editing domain (e.g., the deaminase component). In some embodiments, the additional heterologous portion may be capable of binding to, interacting with, associating with, or forming a complex with a polypeptide. In some embodiments, the additional heterologous portion may be capable of binding to, interacting with, associating with, or forming a complex with a polynucleotide. In some embodiments, the additional heterologous portion may be capable of binding to a guide polynucleotide. In some embodiments, the additional heterologous portion may be capable of binding to a polypeptide linker. In some embodiments, the additional heterologous portion is capable of binding to a polynucleotide linker. An additional heterologous portion may be a protein domain. In some embodiments, an additional heterologous portion comprises a polypeptide, such as a 22 amino acid RNA-binding domain of the lambda bacteriophage antiterminator protein N (N22p), a 2G12 IgG homodimer domain, an ABI, an antibody (e.g. an antibody that binds a component of the base editor system or a heterologous portion thereof) or fragment thereof (e.g. heavy chain domain 2 (CH₂) of IgM (MHD2) or IgE (EHD2), an immunoglobulin Fc region, a heavy chain domain 3 (CH3) of IgG or IgA, a heavy chain domain 4 (CH4) of IgM or IgE, an Fab, an Fab2, miniantibodies, and/or ZIP antibodies), a barnase-barstar dimer domain, a Bcl-xL domain, a Calcineurin A (CAN) domain, a Cardiac phospholamban transmembrane pentamer domain, a collagen domain, a Com RNA binding protein domain (e.g. SfMu Com coat protein domain, and SfMu Com binding protein domain), a Cyclophilin-Fas fusion protein (CyP-Fas) domain, a Fab domain, an Fc domain, a fibritin foldon domain, an FK506 binding protein (FKBP) domain, an FKBP binding domain (FRB) domain of mTOR, a foldon domain, a fragment X domain, a GAI domain, a GID1 domain, a Glycophorin A transmembrane domain, a GyrB domain, a Halo tag, an HIV Gp41 trimerisation domain, an HPV45 oncoprotein E7 C-terminal dimer domain, a hydrophobic polypeptide, a K Homology (KH) domain, a Ku protein domain (e.g., a Ku heterodimer), a leucine zipper, a LOV domain, a mitochondrial antiviral-signaling protein CARD filament domain, an MS2 coat protein domain (MCP), a non-natural RNA aptamer ligand that binds a corresponding RNA motif/aptamer, a parathyroid hormone dimerization domain, a PP7 coat protein (PCP) domain, a PSD95-Dlgl-zo-1 (PDZ) domain, a PYL domain, a SNAP tag, a SpyCatcher moiety, a SpyTag moiety, a streptavidin domain, a streptavidin-binding protein domain, a streptavidin binding protein (SBP) domain, a telomerase Sm7 protein domain (e.g. Sm7 homoheptamer or a monomeric Sm-like protein), and/or fragments thereof. In embodiments, an additional heterologous portion comprises a polynucleotide (e.g., an RNA motif), such as an MS2 phage operator stem-loop (e.g., an MS2, an MS2 C-5 mutant, or an MS2 F-5 mutant), a non-natural RNA motif, a PP7 operator stem-loop, an SfMu phate Com stem-loop, a sterile alpha motif, a telomerase Ku binding motif, a telomerase Sm7 binding motif, and/or fragments thereof. Non-limiting examples of additional heterologous portions include polypeptides with at least about 85% sequence identity to any one or more of SEQ ID NOs: 380, 382, 384, 386-388, or fragments thereof. Non-limiting examples of additional heterologous portions include polynucleotides with at least about 85% sequence identity to any one or more of SEQ ID NOs: 379, 381, 383, 385, or fragments thereof.

[0285] In some instances, components of the base editing system are associated with one another through the interaction of leucine zipper domains (e.g., SEQ ID NOs: 387 and 388). In some cases, components of the base editing system are associated with one another through polypeptide domains (e.g., FokI domains) that associate to form protein complexes containing about, at least about, or no more than about 1, 2 (i.e., dimerize), 3, 4, 5, 6, 7, 8, 9, 10 polypeptide domain units, optionally the polypeptide domains may include alterations that reduce or eliminate an activity thereof.

[0286] In some instances, components of the base editing system are associated with one another through the interaction of multimeric antibodies or fragments thereof (e.g., IgG, IgD, IgA, IgM, IgE, a heavy chain domain 2 (CH₂) of IgM (MHD2) or IgE (EHD2), an immunoglobulin Fc region, a heavy chain domain 3 (CH3) of IgG or IgA, a heavy chain domain 4 (CH4) of IgM or IgE, an Fab, and an Fab2). In some instances, the antibodies are dimeric, trimeric, or tetrameric. In embodiments, the dimeric antibodies bind a polypeptide or polynucleotide component of the base editing system.

[0287] In some cases, components of the base editing system are associated with one another through the interaction of a polynucleotide-binding protein domain(s) with a polynucleotide(s). In some instances, components of the base editing system are associated with one another through the interaction of one or more polynucleotide-binding protein domains with polynucleotides that are self-complementary and/or complementary to one another so that complementary binding of the polynucleotides to one another brings into association their respective bound polynucleotide-binding protein domain(s).

[0288] In some instances, components of the base editing system are associated with one another through the interaction of a polypeptide domain(s) with a small molecule(s) (e.g., chemical inducers of dimerization (CIDs), also known as “dimerizers”). Non-limiting examples of CIDs include those disclosed in Amara, et al., “A versatile synthetic dimerizer for the regulation of protein-protein interactions,” PNAS, 94:10618-10623 (1997); and Voß, et al. “Chemically induced dimerization: reversible and spatiotemporal control of protein function in cells,” Current Opinion in Chemical Biology, 28:194-201 (2015), the disclosures of each of which are incorporated herein by reference in their entireties for all purposes. In some embodiments, the base editor inhibits base excision repair (BER) of the edited strand. In some embodiments, the base editor protects or binds the non-edited strand. In some embodiments, the base editor comprises UGI activity or USP activity. In some embodiments, the base editor comprises a catalytically inactive inosine-specific nuclease.

[0289] The base editors of the present disclosure can comprise any domain, feature or amino acid sequence which facilitates the editing of a target polynucleotide sequence. For example, in some embodiments, the base editor comprises a nuclear localization sequence (NLS). In some embodiments, an NLS of the base editor is localized between a deaminase domain and a polynucleotide programmable nucleotide binding domain. In some embodiments, an NLS of the base editor is localized C-terminal to a polynucleotide programmable nucleotide binding domain.

[0290] Protein domains included in the fusion protein can be a heterologous functional domain. Non-limiting examples of protein domains which can be included in the fusion protein include a deaminase domain (e.g., cytidine deaminase and/or adenosine deaminase), a uracil glycosylase inhibitor (UGI) domain, epitope tags, and reporter gene sequences.

[0291] In some embodiments, the adenosine base editor (ABE) can deaminate adenine in DNA. In some embodiments, ABE is generated by replacing APOBEC1 component of BE3 with natural or engineered E. coli TadA, human ADAR2, mouse ADA, or human ADAT2. In some embodiments, ABE comprises an evolved TadA variant. In some embodiments, the base editor is ABE8.1, which comprises or consists essentially of the following sequence or a fragment thereof having adenosine deaminase activity: SEQ ID NO: 331. Other ABE8 sequences are provided in the attached sequence listing (SEQ ID NOs: 332-354).

[0292] In some embodiments, the base editor includes an adenosine deaminase variant comprising an amino acid sequence, which contains alterations relative to an ABE 7*10 reference sequence, as described herein. The term “monomer” as used in Table 7 refers to a monomeric form of TadA*7.10 comprising the alterations described. The term “heterodimer” as used in Table 7 refers to the specified wild-type E. coli TadA adenosine deaminase fused to a TadA*7.10 comprising the alterations as described.

TABLE 7
Adenosine Deaminase Base Editor Variants

| | Adenosine | |
|---|---|---|
| ABE | Deaminase | Adenosine Deaminase Description |
| ABE-605m | MSP605 | monomer_TadA*7.10 + V82G + Y147T + Q154S |
| ABE-680m | MSP680 | monomer_TadA*7.10 + I76Y + V82G + Y147T + Q154S |
| ABE-823m | MSP823 | monomer_TadA*7.10 + L36H + V82G + Y147T + Q154S + |
| | | N157K |
| ABE-824m | MSP824 | monomer_TadA*7.10 + V82G + Y147D + F149Y + Q154S + |
| | | D167N |
| ABE-825m | MSP825 | monomer_TadA*7.10+ L36H + V82G + Y147D + F149Y + |
| | | Q154S + N157K + D167N |
| ABE-827m | MSP827 | monomer_TadA*7.10 + L36H + I76Y + V82G + Y147T + Q154S + |
| | | N157K |
| ABE-828m | MSP828 | monomer_TadA*7.10 + I76Y + V82G + Y147D + F149Y + Q154S + |
| | | D167N |
| ABE-829m | MSP829 | monomer_TadA*7.10 + L36H + I76Y + V82G + Y147D + F149Y + |
| | | Q154S + N157K + D167N |
| ABE-605d | MSP605 | heterodimer_(WT) + (TadA*7.10 + V82G + Y147T + Q154S) |
| ABE-680d | MSP680 | heterodimer_(WT) + (TadA*7.10 + I76Y + V82G + Y147T + |
| | | Q154S) |
| ABE-823d | MSP823 | heterodimer_(WT) + (TadA*7.10 + L36H + V82G + Y147T + |
| | | Q154S + N157K) |
| ABE-824d | MSP824 | heterodimer_(WT) + (TadA*7.10 + V82G + Y147D + F149Y + |
| | | Q154S + D167N) |
| ABE-825d | MSP825 | heterodimer_(WT) + (TadA*7.10 + L36H + V82G + Y147D + |
| | | F149Y + Q154S + N157K + D167N) |
| ABE-827d | MSP827 | heterodimer_(WT) + (TadA*7.10 + L36H + I76Y + V82G + Y147T + |
| | | Q154S + N157K) |
| ABE-828d | MSP828 | heterodimer_(WT) + (TadA*7.10 + I76Y + V82G + Y147D + |
| | | F149Y + Q154S + D167N) |
| ABE-829d | MSP829 | heterodimer_(WT) + (TadA*7.10 + L36H + I76Y + V82G + Y147D + |
| | | F149Y + Q154S + N157K + D167N) |

[0293] In some embodiments, the base editor comprises a domain comprising all or a portion (e.g., a functional portion) of a uracil glycosylase inhibitor (UGI) or a uracil stabilizing protein (USP) domain.

### Linkers

[0294] In certain embodiments, linkers may be used to link any of the peptides or peptide domains of the disclosure. The linker may be as simple as a covalent bond, or it may be a polymeric linker many atoms in length. In certain embodiments, the linker is a polypeptide or based on amino acids. In other embodiments, the linker is not peptide-like. In certain embodiments, the linker is a covalent bond (e.g., a carbon-carbon bond, disulfide bond, carbon-heteroatom bond, etc.).

[0295] In some embodiments, any of the fusion proteins provided herein, comprise a cytidine or adenosine deaminase and a Cas9 domain that are fused to each other via a linker. Various linker lengths and flexibilities between the cytidine or adenosine deaminase and the Cas9 domain can be employed (e.g., ranging from very flexible linkers of the form (GGGS)ₙ (SEQ ID NO: 246), (GGGGS)ₙ (SEQ ID NO: 247), and (G)ₙ to more rigid linkers of the form (EAAAK)ₙ (SEQ ID NO: 248), (SGGS)ₙ (SEQ ID NO: 355), SGSETPGTSESATPES (SEQ ID NO: 249) (see, e.g., Guilinger J P, et al. Fusion of catalytically inactive Cas9 to FokI nuclease improves the specificity of genome modification. Nat. Biotechnol. 2014; 32 (6): 577-82; the entire contents are incorporated herein by reference) and (XP) n) in order to achieve the optimal length for activity for the cytidine or adenosine deaminase nucleobase editor. In some embodiments, n is 1, 2, 3, 4, 5, 6, 7, 8, 9, 10, 11, 12, 13, 14, or 15. In some embodiments, the linker comprises a (GGS) n motif, wherein n is 1, 3, or 7. In some embodiments, cytidine deaminase or adenosine deaminase and the Cas9 domain of any of the fusion proteins provided herein are fused via a linker comprising the amino acid sequence SGSETPGTSESATPES (SEQ ID NO: 249), which can also be referred to as the XTEN linker.

[0296] In some embodiments, the domains of the base editor are fused via a linker that comprises the amino acid sequence of:

(SEQ ID NO: 356)
SGGSSGSETPGTSESATPESSGGS,
(SEQ ID NO: 357)
SGGSSGGSSGSETPGTSESATPESSGGSSGGS,
(SEQ ID NO: 358)
GGSGGSPGSPAGSPTSTEEGTSESATPESGPGTSTEPSEGSAPGSPA
GSPTSTEEGTSTEPSEGSAPGTSTEPSEGSAPGTSESATPESGPGSE
PATSGGSGGS,
(SEQ ID NO: 468)
EGGSEEEEESGS,
or
(SEQ ID NO: 469)
KGPKPKKEESEK

[0297] In some embodiments, domains of the base editor are fused via a linker comprising the amino acid sequence SGSETPGTSESATPES (SEQ ID NO: 249), which may also be referred to as the XTEN linker. In some embodiments, a linker comprises the amino acid sequence SGGS (SEQ ID NO: 355). In some embodiments, the linker is 24 amino acids in length. In some embodiments, the linker comprises the amino acid sequence SGGSSGGSSGSETPGTSESATPES (SEQ ID NO: 359). In some embodiments, the linker is 40 amino acids in length. In some embodiments, the linker comprises the amino acid sequence: SGGSSGGSSGSETPGTSESATPESSGGSSGGSSGGSSGGS (SEQ ID NO: 360). In some embodiments, the linker is 64 amino acids in length. In some embodiments, the linker comprises the amino acid sequence: SGGSSGGSSGSETPGTSESATPESSGGSSGGSSGGSSGGSSGSETPGTSESATPESSGGSSGGS (SEQ ID NO: 361). In some embodiments, the linker is 92 amino acids in length. In some embodiments, the linker comprises the amino acid sequence:

(SEQ ID NO: 362)
PGSPAGSPTSTEEGTSESATPESGPGTSTEPSEGSAPGSPAGSPTST
EEGTSTEPSEGSAPGTSTEPSEGSAPGTSESATPESGPGSEPATS

[0298] In some embodiments, a linker comprises a plurality of proline residues and is 5-21, 5-14, 5-9, 5-7 amino acids in length, e.g., PAPAP (SEQ ID NO: 363), PAPAPA (SEQ ID NO: 364), PAPAPAP (SEQ ID NO: 365), PAPAPAPA (SEQ ID NO: 366), P(AP)4 (SEQ ID NO: 367), P(AP)7 (SEQ ID NO: 368), P(AP)10 (SEQ ID NO: 369) (see, e.g., Tan J, Zhang F, Karcher D, Bock R. Engineering of high-precision base editors for site-specific single nucleotide replacement. Nat Commun. 2019 Jan. 25; 10 (1): 439; the entire contents are incorporated herein by reference). Such proline-rich linkers are also termed “rigid” linkers.

Nucleic Acid Programmable DNA Binding Proteins with Guide RNAs

[0299] Provided herein are compositions and methods for base editing in cells. Further provided herein are compositions comprising a guide polynucleotide sequence, e.g., a guide RNA sequence, or a combination of 2, 3, 4, 5, 6, 7, 8, 9, 10, 11, 12, 13, 14, 15, 16, 17, 18, 19, 20, or more guide RNAs as provided herein. In some embodiments, a composition for base editing as provided herein further comprises a polynucleotide that encodes a base editor, e.g., a C-base editor or an A-base editor. For example, a composition for base editing may comprise a mRNA sequence encoding a BE, a BE4, an ABE, and a combination of one or more guide RNAs as provided. A composition for base editing may comprise a base editor polypeptide and a combination of one or more of any guide RNAs provided herein. Such a composition may be used to effect base editing in a cell through different delivery approaches, for example, electroporation, nucleofection, viral transduction or transfection. In some embodiments, the composition for base editing comprises an mRNA sequence that encodes a base editor and a combination of one or more guide RNA sequences provided herein for electroporation.

[0300] Some aspects of this disclosure provide systems comprising any of the fusion proteins or complexes provided herein, and a guide RNA bound to a nucleic acid programmable DNA binding protein (napDNAbp) domain (e.g., a Cas9 (e.g., a dCas9, a nuclease active Cas9, or a Cas9 nickase) or Cas12) of the fusion protein or complex. These complexes are also termed ribonucleoproteins (RNPs). In some embodiments, the guide nucleic acid (e.g., guide RNA) is from 15-100 nucleotides long and comprises a sequence of at least 10 contiguous nucleotides that is complementary to a target sequence. In some embodiments, the target sequence is a DNA sequence. In some embodiments, the target sequence is an RNA sequence. In some embodiments, the target sequence is a sequence in the genome of a bacteria, yeast, fungi, insect, plant, or animal. In some embodiments, the target sequence is a sequence in the genome of a human. In some embodiments, the 3′ end of the target sequence is immediately adjacent to a canonical PAM sequence (NGG). In some embodiments, the 3′ end of the target sequence is immediately adjacent to a non-canonical PAM sequence (e.g., a sequence listed in Table 3 or 5′-NAA-3′). In some embodiments, the guide nucleic acid (e.g., guide RNA) is complementary to a sequence in a gene of interest (e.g., a gene associated with a disease or disorder). Some aspects of this disclosure provide methods of using the fusion proteins, or complexes provided herein. For example, some aspects of this disclosure provide methods comprising contacting a DNA molecule with any of the fusion proteins or complexes provided herein, and with at least one guide RNA, wherein the guide RNA is about 15-100 nucleotides long and comprises a sequence of at least 10 contiguous nucleotides that is complementary to a target sequence.

[0301] The domains of the base editor disclosed herein can be arranged in any order.

[0302] A defined target region can be a deamination window. A deamination window can be the defined region in which a base editor acts upon and deaminates a target nucleotide. In some embodiments, the deamination window is within a 2, 3, 4, 5, 6, 7, 8, 9, or 10 base regions. In some embodiments, the deamination window is 5, 6, 7, 8, 9, 10, 11, 12, 13, 14, 15, 16, 17, 18, 19, 20, 21, 22, 23, 24, or 25 bases upstream of the PAM.

[0303] The base editors of the present disclosure can comprise any domain, feature or amino acid sequence which facilitates the editing of a target polynucleotide sequence.

### Methods of Using Fusion Proteins or Complexes Comprising a Cytidine or Adenosine Deaminase and a Cas9 Domain

[0304] Some aspects of this disclosure provide methods of using the fusion proteins, or complexes provided herein. For example, some aspects of this disclosure provide methods comprising contacting a DNA molecule with any of the fusion proteins or complexes provided herein, and with at least one guide RNA described herein.

[0305] In some embodiments, a fusion protein or complex of the disclosure is used for editing a target gene of interest. In particular, a cytidine deaminase or adenosine deaminase nucleobase editor described herein is capable of making multiple mutations within a target sequence. These mutations may affect the function of the target. For example, when a cytidine deaminase or adenosine deaminase nucleobase editor is used to target a regulatory region the function of the regulatory region is altered and the expression of the downstream protein is reduced or eliminated.

### Base Editor Efficiency

[0306] In some embodiments, the purpose of the methods provided herein is to alter a gene and/or gene product via gene editing. The nucleobase editing proteins provided herein can be used for gene editing-based human therapeutics in vitro or in vivo. It will be understood by the skilled artisan that the nucleobase editing proteins provided herein, e.g., the fusion proteins or complexes comprising a polynucleotide programmable nucleotide binding domain (e.g., Cas9) and a nucleobase editing domain (e.g., an adenosine deaminase domain or a cytidine deaminase domain) can be used to edit a nucleotide from A to G or C to T.

[0307] Advantageously, base editing systems as provided herein provide genome editing without generating double-strand DNA breaks, without requiring a donor DNA template, and without inducing an excess of stochastic insertions and deletions as CRISPR may do. In some embodiments, the present disclosure provides base editors that efficiently generate an intended mutation, such as a STOP codon, in a nucleic acid (e.g., a nucleic acid within a genome of a subject) without generating a significant number of unintended mutations, such as unintended point mutations.

[0308] The base editors of the disclosure advantageously modify a specific nucleotide base encoding a protein without generating a significant proportion of indels (i.e., insertions or deletions). Such indels can lead to frame shift mutations within a coding region of a gene.

[0309] In some embodiments, the base editors provided herein are capable of generating a ratio of intended mutations to indels (i.e., intended point mutations:unintended point mutations) that is greater than 1:1. In some embodiments, the base editors provided herein are capable of generating a ratio of intended mutations to indels that is at least 1.5:1, at least 2:1, at least 2.5:1, at least 3:1, at least 3.5:1, at least 4:1, at least 4.5:1, at least 5:1, at least 5.5:1, at least 6:1, at least 6.5:1, at least 7:1, at least 7.5:1, at least 8:1, at least 10:1, at least 12:1, at least 15:1, at least 20:1, at least 25:1, at least 30:1, at least 40:1, at least 50:1, at least 100:1, at least 200:1, at least 300:1, at least 400:1, at least 500:1, at least 600:1, at least 700:1, at least 800:1, at least 900:1, or at least 1000:1, or more. The number of intended mutations and indels may be determined using any suitable method.

[0310] In some embodiments, the base editors provided herein can limit formation of indels in a region of a nucleic acid. In some embodiments, the region is at a nucleotide targeted by a base editor or a region within 2, 3, 4, 5, 6, 7, 8, 9, or 10 nucleotides of a nucleotide targeted by a base editor. In some embodiments, any of the base editors provided herein can limit the formation of indels at a region of a nucleic acid to less than 1%, less than 1.5%, less than 2%, less than 2.5%, less than 3%, less than 3.5%, less than 4%, less than 4.5%, less than 5%, less than 6%, less than 7%, less than 8%, less than 9%, less than 10%, less than 12%, less than 15%, or less than 20%.

[0311] Base editing is often referred to as a “modification”, such as, a genetic modification, a gene modification and modification of the nucleic acid sequence and is clearly understandable based on the context that the modification is a base editing modification. A base editing modification is therefore a modification at the nucleotide base level, for example as a result of the deaminase activity discussed throughout the disclosure, which then results in a change in the gene sequence and may affect the gene product.

[0312] In some embodiments, the modification, e.g., single base edit results in about or at least about a 10%, 15%, 20%, 25%, 30%, 35%, 40%, 45%, 50%, 55%, 60%, 65%, 70%, 75%, 80%, 85%, 90%, 95%, 99%, or 100% reduction, or reduction to an undetectable level, of the gene targeted expression.

[0313] The disclosure provides adenosine deaminase variants (e.g., ABE8 variants) that have increased efficiency and specificity. In particular, the adenosine deaminase variants described herein are more likely to edit a desired base within a polynucleotide and are less likely to edit bases that are not intended to be altered (e.g., “bystanders”).

[0314] In some embodiments, any of the base editing system comprising one of the ABE8 base editor variants described herein has reduced bystander editing or mutations by at least 1%, 2%, 3%, 4%, 5%, 10%, 15%, 20%, 25%, 30%, 35%, 40%, 45%, 50%, 55%, 60%, 65%, 70%, 75%, 80%, 85%, 90%, 95%, or 99% compared to a base editor system comprising an ABE7 base editor, e.g., ABE7.10.

[0315] In some embodiments, any of the ABE8 base editor variants described herein has higher base editing efficiency compared to the ABE7 base editors. In some embodiments, any of the ABE8 base editor variants described herein have at least 1%, 2%, 3%, 4%, 5%, 10%, 15%, 20%, 25%, 30%, 35%, 40%, 45%, 50%, 55%, 60%, 65%, 70%, 75%, 80%, 85%, 90%, 95%, 99%, 100%, 105%, 110%, 115%, 120%, 125%, 130%, 135%, 140%, 145%, 150%, 155%, 160%, 165%, 170%, 175%, 180%, 185%, 190%, 195%, 200%, 210%, 220%, 230%, 240%, 250%, 260%, 270%, 280%, 290%, 300%, 310%, 320%, 330%, 340%, 350%, 360%, 370%, 380%, 390%, 400%, 450%, or 500% higher base editing efficiency compared to an ABE7 base editor, e.g., ABE7.10.

[0316] The ABE8 base editor variants described herein may be delivered to a host cell via a plasmid, a vector, a LNP complex, or an mRNA. In some embodiments, any of the ABE8 base editor variants described herein is delivered to a host cell as an mRNA.

[0317] In some embodiments, the method described herein, for example, the base editing methods has minimum to no off-target effects. In some embodiments, the method described herein, for example, the base editing methods, has minimal to no chromosomal translocations.

[0318] In some embodiments, the base editing method described herein results in about 91%, 92%, 93%, 94%, 95%, 96%, 97%, 98%, 99% or 100% of a cell population that have been successfully edited.

[0319] In some embodiments, the percent of viable cells in a cell population following a base editing intervention is greater than at least 60%, 70%, 80%, or 90% of the starting cell population at the time of the base editing event. In some embodiments, the percent of viable cells in a cell population following editing is about 70%. In some embodiments, the percent of viable cells in a cell population following editing is about 75%. In some embodiments, the percent of viable cells in a cell population following editing is about 80%. In some embodiments, the percent of viable cells in a cell population as described above is about 85%. In some embodiments, the percent of viable cells in a cell population as described above is about 90%, or about 91%, 92%, 93%, 94% 95%, 96%, 97%, 98%, 99%, or 100% of the cells in the population at the time of the base editing event.

[0320] In embodiments, the cell population is a population of cells contacted with a base editor, complex, or base editor system of the present disclosure.

[0321] The number of intended mutations and indels can be determined using any suitable method, for example, as described in International PCT Application Nos. PCT/US2017/045381 (WO2018/027078) and PCT/US2016/058344 (WO2017/070632); Komor, A. C., et al., “Programmable editing of a target base in genomic DNA without double-stranded DNA cleavage” Nature 533, 420-424 (2016); Gaudelli, N. M., et al., “Programmable base editing of A·T to G·C in genomic DNA without DNA cleavage” Nature 551, 464-471 (2017); and Komor, A. C., et al., “Improved base excision repair inhibition and bacteriophage Mu Gam protein yields C:G-to-T:A base editors with higher efficiency and product purity” Science Advances 3: eaao4774 (2017); the entire contents of which are hereby incorporated by reference.

[0322] In some embodiments, to calculate indel frequencies, sequencing reads are scanned for exact matches to two 10-bp sequences that flank both sides of a window in which indels can occur. If no exact matches are located, the read is excluded from analysis. If the length of this indel window exactly matches the reference sequence the read is classified as not containing an indel. If the indel window is two or more bases longer or shorter than the reference sequence, then the sequencing read is classified as an insertion or deletion, respectively. In some embodiments, the base editors provided herein can limit formation of indels in a region of a nucleic acid. In some embodiments, the region is at a nucleotide targeted by a base editor or a region within 2, 3, 4, 5, 6, 7, 8, 9, or 10 nucleotides of a nucleotide targeted by a base editor.

### Multiplex Editing

[0323] In some embodiments, the base editor system provided herein is capable of multiplex editing of a plurality of nucleobase pairs in one or more genes or polynucleotide sequences. In some embodiments, the plurality of nucleobase pairs is located in the same gene or in one or more genes, wherein at least one gene is located in a different locus. In some embodiments, the multiplex editing comprises one or more guide polynucleotides. In some embodiments, the multiplex editing comprises one or more base editor systems. In some embodiments, the multiplex editing comprises one or more base editor systems with a single guide polynucleotide or a plurality of guide polynucleotides. In some embodiments, the multiplex editing comprises one or more guide polynucleotides with a single base editor system. It should be appreciated that the characteristics of the multiplex editing using any of the base editors as described herein can be applied to any combination of methods using any base editor provided herein. It should also be appreciated that the multiplex editing using any of the base editors as described herein can comprise a sequential editing of a plurality of nucleobase pairs.

[0324] In some embodiments, the base editor system capable of multiplex editing of a plurality of nucleobase pairs in one or more genes comprises one of ABE7, ABE8, and/or ABE9 base editors.

### Expression of Fusion Proteins or Complexes in a Host Cell

[0325] Fusion proteins or complexes of the disclosure comprising a deaminase may be expressed in virtually any host cell of interest, including but not limited to bacteria, yeast, fungi, insects, plants, and animal cells using routine methods known to the skilled artisan. For example, a DNA encoding an adenosine deaminase of the disclosure can be cloned by designing suitable primers for the upstream and downstream of CDS based on the cDNA sequence. The cloned DNA may be directly, or after digestion with a restriction enzyme when desired, or after addition of a suitable linker and/or a nuclear localization signal, ligated with a DNA encoding one or more additional components of a base editing system. The base editing system is translated in a host cell to form a complex.

[0326] A polynucleotide encoding a polypeptide described herein can be obtained by chemically synthesizing the polynucleotide, or by connecting synthesized partly overlapping oligo short chains by utilizing the PCR method and the Gibson Assembly method to construct a polynucleotide (e.g., DNA) encoding the full length thereof. The advantage of constructing a full-length polynucleotide by chemical synthesis or a combination of PCR method or Gibson Assembly method is that the codons to be used can be selected in according to the host into which the polynucleotide is to be introduced. In the expression from a heterologous DNA molecule, the protein expression level is expected to increase by converting the DNA sequence thereof to a codon highly frequently used in the host organism. Codon use data for a host cell (e.g., codon use data available at kazusa. or .jp/codon/index.html) can be used to guide codon optimization for a polynucleotide sequence encoding a polypeptide. Codons having low use frequency in the host may be converted to a codon coding the same amino acid and having high use frequency.

[0327] An expression vector containing a polynucleotide encoding a nucleic acid sequence-recognizing module and/or a nucleic acid base converting enzyme can be produced, for example, by linking the DNA to the downstream of a promoter in a suitable expression vector.

[0328] As the expression vector, Escherichia coli-derived plasmids (e.g., pBR322, pBR325, pUC12, pUC13); Bacillus subtilis-derived plasmids (e.g., pUB110, pTP5, pC194); yeast-derived plasmids (e.g., pSH19, pSH15); insect cell expression plasmids (e.g., pFast-Bac); animal cell expression plasmids (e.g., pA1-11, pXT1, pRc/CMV, pRc/RSV, pcDNAI/Neo); bacteriophages such as .lambda phage and the like; insect virus vectors such as baculovirus and the like (e.g., BmNPV, AcNPV); animal virus vectors such as retrovirus, vaccinia virus, adenovirus and the like, and the like are used.

[0329] Regarding the promoter to be used, any promoter appropriate for a host to be used for gene expression can be used. In a method using double-stranded breaks, since the survival rate of the host cell sometimes reduces markedly due to the toxicity, it is desirable to increase the number of cells by the start of the induction by using an inductive promoter. However, since sufficient cell proliferation can also be afforded by expressing the nucleic acid-modifying enzyme complex of the present disclosure, a constitutive promoter can be used without limitation.

[0330] For example, when the host is an animal cell, an SR.alpha. promoter, SV40 promoter, LTR promoter, cytomegalovirus (CMV) promoter, Rous sarcoma virus (RSV) promoter, Moloney mouse leukemia virus (MoMuLV), LTR, herpes simplex virus thymidine kinase (HSV-TK) promoter, and the like can be used. Of these, CMV promoter, SR.alpha. promoter and the like may be used.

[0331] Expression vectors for use in the present disclosure, besides those mentioned above, can comprise an enhancer, a splicing signal, a terminator, a poly A addition signal, a selection marker such as drug resistance gene, an auxotrophic complementary gene and the like, a replication origin, and the like can be used.

[0332] An RNA encoding a protein domain described herein can be prepared by, for example, in vitro transcription of a nucleic acid sequence encoding any of the fusion proteins or complexes disclosed herein.

[0333] A fusion protein or complex of the disclosure can be intracellularly expressed by introducing into the cell an expression vector comprising a nucleic acid sequence encoding the fusion protein or complex.

[0334] An expression vector can be introduced by a known method (e.g., the lysozyme method, the competent method, the PEG method, the CaCl₂) coprecipitation method, electroporation, microinjection, particle gun method, lipofection, Agrobacterium-mediated delivery, etc.) according to the kind of the host.

[0335] A vector can be introduced into an animal cell according to the methods described in, for example, Cell Engineering additional volume 8, New Cell Engineering Experiment Protocol, 263-267 (1995) (published by Shujunsha), and Virology, 52, 456 (1973).

[0336] A cell comprising a vector can be cultured according to a known method according to the kind of the host.

[0337] As a medium for culturing an animal cell, for example, minimum essential medium (MEM) containing about 5 to about 20% of fetal bovine serum [Science, 122, 501 (1952)], Dulbecco's modified Eagle medium (DMEM) [Virology, 8, 396 (1959)], RPMI 1640 medium [The Journal of the American Medical Association, 199, 519 (1967)], 199 medium [Proceeding of the Society for the Biological Medicine, 73, 1 (1950)] and the like are used. The pH of the medium may be between about 6 to about 8. The culture is performed at generally about 30° C. to about 40° C. Where necessary, aeration and stirring may be performed.

[0338] When a higher eukaryotic cell, such as animal cell, insect cell, plant cell and the like is used as a host cell, a polynucleotide encoding a base editing system of the present disclosure (e.g., comprising an adenosine deaminase variant) is introduced into a host cell under the regulation of an inducible promoter (e.g., metallothionein promoter (induced by heavy metal ion), heat shock protein promoter (induced by heat shock), Tet-ON/Tet-OFF system promoter (induced by addition or removal of tetracycline or a derivative thereof), steroid-responsive promoter (induced by steroid hormone or a derivative thereof) etc.), the induction substance is added to the medium (or removed from the medium) at an appropriate stage to induce expression of the nucleic acid-modifying enzyme complex, culture is performed for a given period to carry out a base editing and, introduction of a mutation into a target gene, transient expression of the base editing system can be realized.

[0339] Alternatively, an inductive promoter can also be utilized as a vector removal mechanism when higher eukaryotic cells, such as animal cell, insect cell, plant cell and the like are used as a host cell. That is, a vector is mounted with a replication origin that functions in a host cell, and a nucleic acid encoding a protein necessary for replication (e.g., SV40 on and large T antigen, oriP and EBNA-1 etc. for animal cells), of the expression of the nucleic acid encoding the protein is regulated by the above-mentioned inducible promoter. As a result, while the vector is autonomously replicable in the presence of an induction substance, when the induction substance is removed, autonomous replication is not available, and the vector naturally falls off along with cell division (autonomous replication is not possible by the addition of tetracycline and doxycycline in Tet-OFF system vector).

### Delivery Systems

### Nucleic Acid-Based Delivery of Base Editor Systems

[0340] Nucleic acid molecules encoding a base editor system according to the present disclosure can be administered to subjects or delivered into cells in vitro or in vivo by art-known methods or as described herein. For example, a base editor system comprising a deaminase (e.g., cytidine or adenine deaminase) can be delivered by vectors (e.g., viral or non-viral vectors), or by naked DNA, DNA complexes, lipid nanoparticles, or a combination of the aforementioned compositions. A base editor system may be delivered to a cell using any methods available in the art including, but not limited to, physical methods (e.g., electroporation, particle gun, calcium phosphate transfection), viral methods, non-viral methods (e.g., liposomes, cationic methods, lipid nanoparticles, polymeric nanoparticles), or biological non-viral methods (e.g., attenuated bacterial, engineered bacteriophages, mammalian virus-like particles, biological liposomes, erythrocyte ghosts, exosomes).

[0341] Nanoparticles, which can be organic or inorganic, are useful for delivering a base editor system or component thereof. Nanoparticles are well known in the art and any suitable nanoparticle can be used to deliver a base editor system or component thereof, or a nucleic acid molecule encoding such components. In one example, organic (e.g., lipid and/or polymer) nanoparticles are suitable for use as delivery vehicles in certain embodiments of this disclosure. Non-limiting examples of lipid nanoparticles suitable for use in the methods of the present disclosure include those described in International Patent Application Publications No. WO2022140239, WO2022140252, WO2022140238, WO2022159421, WO2022159472, WO2022159475, WO2022159463, WO2021113365, WO2024019936, and WO2021141969, the disclosures of each of which is incorporated herein by reference in its entirety for all purposes.

### Viral Vectors

[0342] A base editor described herein can be delivered with a viral vector. In some embodiments, a base editor disclosed herein can be encoded on a nucleic acid that is contained in a viral vector. In some embodiments, one or more components of the base editor system can be encoded on one or more viral vectors.

[0343] Viral vectors can include lentivirus (e.g., HIV and FIV-based vectors), Adenovirus (e.g., AD100), Retrovirus (e.g., Maloney murine leukemia virus, MML-V), herpesvirus vectors (e.g., HSV-2), rabies virus (see, e.g., U.S. Patent Application Publication No. US 2022/0290164 A1, the disclosure of which is incorporated herein by reference in its entirety for all purposes), and Adeno-associated viruses (AAVs), or other plasmid or viral vector types, in particular, using formulations and doses from, for example, U.S. Pat. No. 8,454,972 (formulations, doses for adenovirus), U.S. Pat. No. 8,404,658 (formulations, doses for AAV) and U.S. Pat. No. 5,846,946 (formulations, doses for DNA plasmids) and from clinical trials and publications regarding the clinical trials involving lentivirus, AAV and adenovirus. For example, for AAV, the route of administration, formulation and dose can be as in U.S. Pat. No. 8,454,972 and as in clinical trials involving AAV. For Adenovirus, the route of administration, formulation and dose can be as in U.S. Pat. No. 8,404,658 and as in clinical trials involving adenovirus. For plasmid delivery, the route of administration, formulation and dose can be as in U.S. Pat. No. 5,846,946 and as in clinical studies involving plasmids. Doses can be based on or extrapolated to an average 70 kg individual (e.g., a male adult human), and can be adjusted for patients, subjects, mammals of different weight and species. Frequency of administration is within the ambit of the medical or veterinary practitioner (e.g., physician, veterinarian), depending on usual factors including the age, sex, general health, other conditions of the patient or subject and the particular condition or symptoms being addressed. The viral vectors can be injected into the tissue of interest. For cell-type specific base editing, the expression of the base editor and optional guide nucleic acid can be driven by a cell-type specific promoter.

[0344] Viral vectors can be selected based on the application. For example, for in vivo gene delivery, AAV can be advantageous over other viral vectors. In some embodiments, AAV allows low toxicity, which can be due to the purification method not requiring ultra-centrifugation of cell particles that can activate the immune response. In some embodiments, AAV allows low probability of causing insertional mutagenesis because it doesn't integrate into the host genome. Adenoviruses are commonly used as vaccines because of the strong immunogenic response they induce. Packaging capacity of the viral vectors can limit the size of the base editor that can be packaged into the vector.

[0345] AAV has a packaging capacity of about 4.5 Kb or 4.75 Kb including two 145 base inverted terminal repeats (ITRs). This means disclosed base editor as well as a promoter and transcription terminator can fit into a single viral vector. Constructs larger than 4.5 or 4.75 Kb can lead to significantly reduced virus production. For example, SpCas9 is quite large, the gene itself is over 4.1 Kb, which makes it difficult for packing into AAV. Therefore, embodiments of the present disclosure include utilizing a disclosed base editor which is shorter in length than conventional base editors. In some examples, the base editors are less than 4 kb. Disclosed base editors can be less than 4.5 kb, 4.4 kb, 4.3 kb, 4.2 kb, 4.1 kb, 4 kb, 3.9 kb, 3.8 kb, 3.7 kb, 3.6 kb, 3.5 kb, 3.4 kb, 3.3 kb, 3.2 kb, 3.1 kb, 3 kb, 2.9 kb, 2.8 kb, 2.7 kb, 2.6 kb, 2.5 kb, 2 kb, or 1.5 kb. In some embodiments, the disclosed base editors are 4.5 kb or less in length.

[0346] An AAV can be AAV1, AAV2, AAV5, AAV6, AAV9, PHP.EB, PHP.B, AAV.CAP-B10, AAV, CAP-B22, AAV-rh10, a PAL family AAV, or any combination thereof. In embodiments, the AAV is capable of crossing the blood-brain barrier (see, e.g., those AAV vectors disclosed in Liu, et al. “Crossing the blood-brain barrier with AAV vectors,” Metabolic Brain Disease, 36:45-52 (2021), the disclosure of which is incorporated herein by reference in its entirety for all purposes). One can select the type of AAV with regard to the cells to be targeted; e.g., one can select AAV serotypes 1, 2, 5 or a hybrid capsid AAV1, AAV2, AAV5 or any combination thereof for targeting brain or neuronal cells; and one can select AAV4 for targeting cardiac tissue. AAV8 is useful for delivery to the liver. A tabulation of certain AAV serotypes as to these cells can be found in Grimm, D. et al, J. Virol. 82:5887-5911 (2008)).

[0347] In some embodiments, the AAV vector contains a PAL family AAV capsid (see, Stanton, A., et al. Med 4:31-50 (2023) (doi: doi.org/10.1016/j.medj.2022.11.002), the disclosure of which is incorporated herein by reference in its entirety for all purposes). In some embodiments, lentiviral vectors are used to transduce a cell of interest with a polynucleotide encoding a base editor or base editor system as provided herein. Lentiviruses are complex retroviruses that have the ability to infect and express their genes in both mitotic and post-mitotic cells. The most commonly known lentivirus is the human immunodeficiency virus (HIV), which uses the envelope glycoproteins of other viruses to target a broad range of cell types.

[0348] In another embodiment, minimal non-primate lentiviral vectors based on the equine infectious anemia virus (EIAV) are also contemplated. In another embodiment, RetinoStat®, an equine infectious anemia virus-based lentiviral gene therapy vector that expresses angiostatic proteins endostatin and angiostatin that is contemplated to be delivered via a subretinal injection. In another embodiment, use of self-inactivating lentiviral vectors are contemplated.

[0349] Any RNA of the systems, for example a guide RNA or a base editor-encoding mRNA, can be delivered in the form of RNA. Base editor-encoding mRNA can be generated using in vitro transcription. For example, nuclease mRNA can be synthesized using a PCR cassette containing the following elements: T7 promoter, optional kozak sequence (GCCACC), nuclease sequence, and 3′ UTR such as a 3′ UTR from beta globin-poly A tail. The cassette can be used for transcription by T7 polymerase. Guide polynucleotides (e.g., gRNA) can also be transcribed using in vitro transcription from a cassette containing a T7 promoter, followed by the sequence “GG”, and guide polynucleotide sequence.

### Non-Viral Platforms for Gene Transfer

[0350] Non-viral platforms for introducing a heterologous polynucleotide into a cell of interest are known in the art.

[0351] For example, the disclosure provides a method of inserting a heterologous polynucleotide into the genome of a cell using a Cas9 or Cas12 (e.g., Cas12b) ribonucleoprotein complex (RNP)-DNA template complex where an RNP including a Cas9 or Cas12 nuclease domain and a guide RNA, wherein the guide RNA specifically hybridizes to a target region of the genome of the cell, and wherein the Cas nuclease domain cleaves the target region to create an insertion site in the genome of the cell. A DNA template is then used to introduce a heterologous polynucleotide. In embodiments, the DNA template is a double-stranded or single-stranded DNA template, wherein the size of the DNA template is about 200 nucleotides or is greater than about 200 nucleotides, wherein the 5′ and 3′ ends of the DNA template comprise nucleotide sequences that are homologous to genomic sequences flanking the insertion site. In some embodiments, the DNA template is a single-stranded circular DNA template. In embodiments, the molar ratio of RNP to DNA template in the complex is from about 3:1 to about 100:1.

[0352] In some embodiments, the DNA template is a linear DNA template. In some examples, the DNA template is a single-stranded DNA template. In certain embodiments, the single-stranded DNA template is a pure single-stranded DNA template. In some embodiments, the single stranded DNA template is a single-stranded oligodeoxynucleotide (ssODN).

[0353] In other embodiments, a single-stranded DNA (ssDNA) can produce efficient homology-directed repair (HDR) with minimal off-target integration. In one embodiment, an ssDNA phage is used to efficiently and inexpensively produce long circular ssDNA (cssDNA) donors. These cssDNA donors serve as efficient HDR templates when used with Cas9 or Cas12 (e.g., Cas12a, Cas12b), with integration frequencies superior to linear ssDNA (IssDNA) donors.

[0354] In some embodiments, a heterologous polynucleotide may be inserted into the genome of a cell using a transposable element such as a transposon, as described, for example, in Tipanee, et al. Human Gene Therapy, November 2017, 1087-1104, DOI: 10.1089/hum.2017.128. Transposable elements are divided into two categories: retrotransposons and DNA transposons. Transposable elements can alter the genome of the host cells through insertions, duplications, deletions, and translocations. Retrotransposons are described as mobile elements that employ an RNA intermediate that is first reverse transcribed into a complementary single-stranded (c) DNA strand by a reverse transcriptase encoded by the retrotransposon. Subsequently, the single-stranded DNA is converted into a double-stranded DNA that then integrates into the host genome. This so-called “replicative mechanism” yields several new copies of retrotransposons expanding throughout the target genome over evolutionary time. Retrotransposons are categorized into many subtypes according to the DNA sequences of the long terminal repeats and its open reading frames. Retrotransposons were employed to enable transgene integration into the target cell DNA, in some cases relying on adenoviral delivery. Alternatively, DNA transposons translocate via a “non-replicative mechanism,” whereby two Terminal Inverted Repeats (TIRs) are recognized and cleaved by a transposase enzyme, releasing the cognate DNA transposons with free DNA ends. The excised DNA transposons then integrate into a new genomic region where target sites are recognized and cut by the same transposase. This cut-and-paste mechanism usually duplicates DNA target sites upon insertion, leaving target site duplications (TSDs). Non-limiting examples of transposons include the Sleeping Beauty (SB) transposon, the piggyBac (PB) transposon, and Tol2 transposable elements.

### Inteins

[0355] Inteins (intervening protein) are auto-processing domains found in a variety of diverse organisms, which carry out a process known as protein splicing.

[0356] Non-limiting examples of inteins include any intein or intein-pair known in the art, which include a synthetic intein based on the dnaE intein, the Cfa-N (e.g., split intein-N) and Cfa-C (e.g., split intein-C) intein pair, has been described (e.g., in Stevens et al., J Am Chem Soc. 2016 Feb. 24; 138 (7): 2162-5, incorporated herein by reference), and DnaE. Non-limiting examples of pairs of inteins that may be used in accordance with the present disclosure include: Cfa DnaE intein, Ssp GyrB intein, Ssp DnaX intein, Ter DnaE3 intein, Ter ThyX intein, Rma DnaB intein and Cne Prp8 intein (e.g., as described in U.S. Pat. No. 8,394,604, incorporated herein by reference). Exemplary nucleotide and amino acid sequences of inteins are provided in the Sequence Listing at SEQ ID NOs: 370-377 and 389-424. Inteins suitable for use in embodiments of the present disclosure and methods for use thereof are described in U.S. Pat. No. 10,526,401, International Patent Application Publications No. WO 2013/045632, WO 2024/073385, or WO 2020/051561, and in U.S. Patent Application Publication No. US 2020/0055900, the full disclosures of which are incorporated herein by reference in their entireties by reference for all purposes.

[0357] Intein-N and intein-C may be fused to the N-terminal portion of a split Cas9 and the C-terminal portion of the split Cas9, respectively, for the joining of the N-terminal portion of the split Cas9 and the C-terminal portion of the split Cas9. For example, in some embodiments, an intein-N is fused to the C-terminus of the N-terminal portion of the split Cas9, i.e., to form a structure of N-[N-terminal portion of the split Cas9]-[intein-N]-C. In some embodiments, an intein-C is fused to the N-terminus of the C-terminal portion of the split Cas9, i.e., to form a structure of N-[intein-C]-[C-terminal portion of the split Cas9]-C. In embodiments, a base editor is encoded by two polynucleotides, where one polynucleotide encodes a fragment of the base editor fused to an intein-N and another polynucleotide encodes a fragment of the base editor fused to an intein-C. Methods for designing and using inteins are known in the art and described, for example by WO2014004336, WO2017132580, WO2013045632A1, US20150344549, and US20180127780, each of which is incorporated herein by reference in their entirety.

[0358] In some embodiments, an ABE was split into N- and C-terminal fragments at Ala, Ser, Thr, or Cys residues within selected regions of SpCas9. These regions correspond to loop regions identified by Cas9 crystal structure analysis.

[0359] The N-terminal fragment is fused at the C-terminus to an intein-N and the C-terminal fragment is fused to an intein-C at an N-terminal amino acid selected from the group consisting of S303, T310, T313, S355, A456, S460, A463, T466, S469, T472, T474, C574, S577, A589, and S590, referenced to SEQ ID NO: 197. In various embodiments, the SpCas9 is split between amino acid positions 302 and 303, 309 and 310, 312 and 313, 354 and 355, 455 and 456, 459 and 460, 462 and 463, 465 and 466, 468 and 469, 471 and 472, 473 and 474, 573 and 574, 576 and 577, 588 and 589, or 589 and 590, referenced to SEQ ID NO: 197 to yield an N-terminal fragment and a C-terminal fragment, where the N-terminal fragment is fused at the C-terminus to a an intein-N and where the C-terminal fragment is fused at the N-terminus to an intein-C.

### Pharmaceutical Compositions

[0360] In some aspects, the present disclosure provides a pharmaceutical composition comprising any of the cells, polynucleotides, vectors, base editors, base editor systems, guide polynucleotides, fusion proteins, complexes, or the fusion protein-guide polynucleotide complexes described herein.

[0361] The pharmaceutical compositions of the present disclosure can be prepared in accordance with known techniques. See, e.g., Remington, The Science And Practice of Pharmacy (21st ed. 2005). In general, the cell, or population thereof is admixed with a suitable carrier prior to administration or storage, and in some embodiments, the pharmaceutical composition further comprises a pharmaceutically acceptable carrier. Suitable pharmaceutically acceptable carriers generally comprise inert substances that aid in administering the pharmaceutical composition to a subject, aid in processing the pharmaceutical compositions into deliverable preparations, or aid in storing the pharmaceutical composition prior to administration. Pharmaceutically acceptable carriers can include agents that can stabilize, optimize or otherwise alter the form, consistency, viscosity, pH, pharmacokinetics, solubility of the formulation. Such agents include buffering agents, wetting agents, emulsifying agents, diluents, encapsulating agents, and skin penetration enhancers. For example, carriers can include, but are not limited to, saline, buffered saline, dextrose, arginine, sucrose, water, glycerol, ethanol, sorbitol, dextran, sodium carboxymethyl cellulose, and combinations thereof.

[0362] In some embodiments, the pharmaceutical composition is formulated for delivery to a subject. Suitable routes of administrating the pharmaceutical composition described herein include, without limitation: topical, subcutaneous, transdermal, intradermal, intralesional, intraarticular, intraperitoneal, intravesical, transmucosal, gingival, intradental, intracochlear, transtympanic, intraorgan, epidural, intrathecal, intramuscular, intravenous, intravascular, intraosseus, periocular, intratumoral, intracerebral, and intracerebroventricular administration.

[0363] In some embodiments, the pharmaceutical composition described herein is administered locally to a diseased site (e.g., a liver). In some embodiments, the pharmaceutical composition described herein is administered to a subject by injection, by means of a catheter, by means of a suppository, or by means of an implant, the implant being of a porous, non-porous, or gelatinous material, including a membrane, such as a sialastic membrane, or a fiber.

[0364] In some embodiments, any of the fusion proteins, gRNAs, and/or complexes described herein are provided as part of a pharmaceutical composition. In some embodiments, the pharmaceutical composition comprises any of the fusion proteins or complexes provided herein. In some embodiments pharmaceutical composition comprises a gRNA, a nucleic acid programmable DNA binding protein, a cationic lipid, and a pharmaceutically acceptable excipient. In embodiments, pharmaceutical compositions comprise a lipid nanoparticle and a pharmaceutically acceptable excipient. In embodiments, the lipid nanoparticle contains a gRNA, a base editor, a complex, a base editor system, or a component thereof of the present disclosure, and/or one or more polynucleotides encoding the same. Pharmaceutical compositions can optionally comprise one or more additional therapeutically active substances.

[0365] The compositions, as described above, can be administered in effective amounts. The effective amount will depend upon the mode of administration, the particular condition being treated, and the desired outcome. It may also depend upon the stage of the condition, the age and physical condition of the subject, the nature of concurrent therapy, if any, and like factors well-known to the medical practitioner. For therapeutic applications, it is that amount sufficient to achieve a medically desirable result.

[0366] In some embodiments, compositions in accordance with the present disclosure can be used for treatment of any of a variety of diseases, disorders, and/or conditions.

### Methods of Treatment

[0367] Some aspects of the present disclosure provide methods of treating a subject in need, the method comprising administering to a subject in need an effective therapeutic amount of a pharmaceutical composition as described herein. More specifically, the methods of treatment include administering to a subject in need thereof a lipid nanoparticle containing a guide RNA molecule and an mRNA molecule encoding a base editor of the disclosure. In other embodiments, the methods of the disclosure comprise expressing or introducing into a cell a base editor polypeptide and one or more guide RNAs capable of targeting a nucleic acid molecule encoding at least one polypeptide.

[0368] One of ordinary skill in the art would recognize that multiple administrations of the pharmaceutical compositions contemplated in particular embodiments may be required to affect the desired therapy. For example, a composition may be administered to the subject 1, 2, 3, 4, 5, 6, 7, 8, 9, or 10 or more times over a span of 1 week, 2 weeks, 3 weeks, 1 month, 2 months, 3 months, 4 months, 5 months, 6 months, 1 year, 2 years, 5, years, 10 years, or more.

[0369] Administration of the pharmaceutical compositions contemplated herein may be carried out using conventional techniques including, but not limited to, infusion, transfusion, or parenterally. In some embodiments, parenteral administration includes infusing or injecting intravascularly, intravenously, intramuscularly, intraarterially, intrathecally, intratumorally, intradermally, intraperitoneally, transtracheally, subcutaneously, subcuticularly, intraarticularly, subcapsularly, subarachnoidly and intrasternally.

### Kits

[0370] The disclosure provides kits for the treatment of phenylketonuria in a subject. In some embodiments, the kit further includes a base editor system or a polynucleotide encoding a base editor system, wherein the base editor polypeptide system a nucleic acid programmable DNA binding protein (napDNAbp), a deaminase, and a guide RNA. In some embodiments, the napDNAbp is Cas9 or Cas12. In some embodiments, the polynucleotide encoding the base editor is a mRNA sequence. In some embodiments, the deaminase is a cytidine deaminase or an adenosine deaminase. In some embodiments, the kit comprises an edited cell and instructions regarding the use of such cell.

[0371] The kits may further comprise written instructions for using a base editor, base editor system and/or edited cell as described herein. In other embodiments, the instructions include at least one of the following: precautions; warnings; clinical studies; and/or references. The instructions may be printed directly on the container (when present), or as a label applied to the container, or as a separate sheet, pamphlet, card, or folder supplied in or with the container. In a further embodiment, a kit comprises instructions in the form of a label or separate insert (package insert) for suitable operational parameters. In yet another embodiment, the kit comprises one or more containers with appropriate positive and negative controls or control samples, to be used as standard(s) for detection, calibration, or normalization. The kit can further comprise a second container comprising a pharmaceutically-acceptable buffer, such as (sterile) phosphate-buffered saline, Ringer's solution, or dextrose solution. It can further include other materials desirable from a commercial and user standpoint, including other buffers, diluents, filters, needles, syringes, and package inserts with instructions for use.

[0372] The practice of embodiments of the present disclosure employs, unless otherwise indicated, conventional techniques of molecular biology (including recombinant techniques), microbiology, cell biology, biochemistry and immunology, which are well within the purview of the skilled artisan. Such techniques are explained fully in the literature, such as, “Molecular Cloning: A Laboratory Manual”, second edition (Sambrook, 1989); “Oligonucleotide Synthesis” (Gait, 1984); “Animal Cell Culture” (Freshney, 1987); “Methods in Enzymology” “Handbook of Experimental Immunology” (Weir, 1996); “Gene Transfer Vectors for Mammalian Cells” (Miller and Calos, 1987); “Current Protocols in Molecular Biology” (Ausubel, 1987); “PCR: The Polymerase Chain Reaction”, (Mullis, 1994); “Current Protocols in Immunology” (Coligan, 1991). These techniques are applicable to the production of the polynucleotides and polypeptides of the disclosure, and, as such, may be considered in making and practicing embodiments of the disclosure. Particularly useful techniques for particular embodiments will be discussed in the sections that follow.

[0373] The following examples are put forth so as to provide those of ordinary skill in the art with a complete disclosure and description of how to make and use the assay, screening, and therapeutic methods of the disclosure, and are not intended to limit the scope of what the inventors regard as their invention.

### EXAMPLES

### Example 1: Correction of a Pathogenic Nucleobase in a Phenylalanine Hydroxylase (PAH) Polynucleotide Using Base Editor Systems

[0374] Experiments were undertaken to demonstrate that base editor systems of the disclosure are effective in correcting a pathogenic nucleobase in a PAH polynucleotide in GM02406 cells from a phenylketonuria patient.

[0375] GM02406 cells are fibroblast cells from a white male Homo sapiens patient that had phenylketonuria. The GM02406 cells were obtained from the NIGMS Human Genetic Cell Repository. The subject from which the GM02406 cells were obtained had the following attributes: clinically affected; pyloric stenosis; normal level of dihydropteridine reductase in skin fibroblasts; compound heterozygote; one PAH allele had a T>G transversion at nucleotide 896 in Exon 8 (896T>G) resulting in a substitution of cysteine for phenylalanine at codon 299 (Phe299Cys (F299C)) and a second allele had a C>T transition at nucleotide 1222 in Exon 11 (1222C>T) resulting in a substitution of tryptophan for arginine at codon 408 (Arg408Trp).

[0376] To evaluate base editing in the cells, about 6×10e4 GM02406 cells were transfected with base editor systems containing 1000 ng mRNA encoding a base editor containing an adenosine deaminase domain and 33 ng of a guide RNA targeting the base editor to deaminate a target nucleobase in a PAH polynucleotide. At about 72 hours following transfection, on-target and bystander percent A to G base editing was measured in the cells using next-generation sequencing (FIGS. 1, 2E, 3, 4, 5, and 7). The sequences targeted for base editing by each guide polynucleotide are depicted in FIGS. 2A-2E and 7.

[0377] In an effort to identify alternative napDNAbp domains suitable for use in base editor systems for correcting a pathogenic PAH nucleotide, the base editing profile of ABE8.20 (FIG. 6) was taken into consideration as well as the following target sites, where the PAM sequence is shown in hold and the target nucleobase is underlined.

1. Position the target A at pos 4:
(SEQ ID NO: 650)
GCCAA GGTAT TGTGG CAGCA AAGTTC
2. Position the target A at pos 5:
(SEQ ID NO: 651)
GGCCAAGGTA TTGTG GCAGC AAA GTT
3. Position the target A at pos 6:
(SEQ ID NO: 652)
GGGCC AAGGT ATTGT GGCAG CAAAGT
4. Position the target A at pos 7:
(SEQ ID NO: 653)
AGGGC CAAGG TATTG TGGCA GCA AAG

[0378] It was then determined that the napDNAbp domains listed in Table 8 below would be suitable for use in editing a target adenosine (A) identified in the above target sites numbered 1-5:

| Target A pos | Option 1 | Option 2 |
|---|---|---|
| 4 | NRN SpCas9 | NAG Nme2Cas9 (see Huang, et al., |
| | (see Walton, et al, | Nature Biotechnology, 41: 96-107 |
| | Science, 368: 290- | (2023)) |
| | 296 (2020)) | |
| 5 | NAA iSpymac | NNVGTT |
| | (see Chatterjee, et | SaCas9 |
| | al. Nature | (see Ma, et al., Nature |
| | Communications, | Communications, 10: 560 (2019)) |
| | 11: 2474 (2020)) | |
| 6 | NAA iSpymac | NNNRRT |
| | (see Chatterjee, et | SaCas9* |
| | al. Nature | |
| | Communications, | |
| | 11: 2474 (2020)) | |
| 7 | NCA | NNVRRN |
| | NmeCas9 | SaCas9 |
| | (see Huang, et al., | (see Ma, et al., Nature |
| | Nature | Communications, 10: 560 (2019)) |
| | Biotechnology, | |
| | 41: 96-107 (2023)) | |
| 8 | MEW-NGC Cas9 | IBE-NGC*, where “IBE” indicates an |
| | | internal base editor |

[0379] Base editing was found to be effective in correcting the pathogenic PAH nucleobases.

### Other Embodiments

[0380] From the foregoing description, it will be apparent that variations and modifications may be made to the aspects or embodiments described herein to adopt it to various usages and conditions. Such embodiments are also within the scope of the following claims.

[0381] The recitation of a listing of elements in any definition of a variable herein includes definitions of that variable as any single element or combination (or subcombination) of listed elements. The recitation of an embodiment herein includes that embodiment as any single embodiment or in combination with any other embodiments or portions thereof.

[0382] All patents and publications mentioned in this specification are herein incorporated by reference to the same extent as if each independent patent and publication was specifically and individually indicated to be incorporated by reference. The present disclosure may be related to Brooks, et al. “Rapid and definitive treatment of phenylketonuria in variant-humanized mice with corrective editing,” Nature Communications, 14:3451 (2023), doi.org/10.1038/s41467-023-39246-2, the disclosure of which is incorporated herein by reference in its entirety for all purposes.

What is claimed:

1. A method of editing a nucleobase of an phenylalanine hydroxylase (PAH) polynucleotide, the method comprising contacting the PAH polynucleotide with a guide RNA, or a polynucleotide encoding the guide RNA, and a base editor comprising a fusion protein or a protein complex comprising a nucleic acid programmable DNA binding protein (napDNAbp) domain and a deaminase domain, or one or more polynucleotides encoding the base editor, wherein said guide RNA targets said base editor to effect an alteration to a nucleobase in codon 408 of the PAH polynucleotide, wherein the deaminase domain comprises or consists of the following amino acid sequence with one or more amino acid alterations MSEVEFSHEYWMRHALTLAKRARDEREVPVGAVLVLNNRVIGEGWNRAIGLHDPTAHAEIMALR QGGLVMQNYRLIDATLYVTFEPCVMCAGAMIHSRIGRVVFGVRNAKTGAAGSLMDVLHYPGMNH RVEITEGILADECAALLCYFFRMPRQVFNAQKKAQSSTD (SEQ ID NO: 1), or a fragment thereof lacking only the N-terminal methionine, wherein the one or more amino acid alterations comprises or consists of a set of alterations selected from the group consisting of:
a) I76Y, V82T, Y123H, Y147R, and Q154R;
b) I76Y, V82T, Y123H, Y147R, F149Y, and Q154R; and
c) I76Y, V82T, Y123H, Y147D, F149Y, Q154R, T166I, and D167N.

2. The method of claim 1, wherein the alteration to the nucleobase in codon 408 of the PAH polynucleotide results in a W408R amino acid alteration in a PAH polypeptide encoded by the PAH polynucleotide.

3. The method of claim 1, wherein the base editor comprises an amino acid sequence having at least 85% sequence identity to a sequence selected from those listed in Table 2.

4. The method of claim 1, wherein the guide RNA comprises a spacer comprising at least 10 contiguous nucleotides of a spacer sequence selected from those listed in Table 1.

5. The method of claim 1, wherein the one or more polynucleotides encoding the base editor comprise an RNA sequence encoding a polypeptide having at least 85% sequence identity to an amino acid sequence selected from those listed in Table 2.

6. A method of treating phenylketonuria (PKU) in a subject in need thereof, the method comprising administering to a cell of the subject a base editor system comprising a base editor comprising a fusion protein or protein complex comprising a nucleic acid programmable DNA binding protein (napDNAbp) domain and a deaminase domain, or one or more polynucleotides encoding the base editor, and a guide RNA that targets the base editor to effect an alteration to a nucleobase in codon 408 of a phenylalanine hydroxylase (PAH) polynucleotide in the cell, or a polynucleotide encoding the guide RNA, thereby treating hypertension in the subject, wherein the deaminase domain comprises or consists of the following amino acid sequence with one or more amino acid alterations MSEVEFSHEYWMRHALTLAKRARDEREVPVGAVLVLNNRVIGEGWNRAIGLHDPTAHAEIMALR QGGLVMQNYRLIDATLYVTFEPCVMCAGAMIHSRIGRVVFGVRNAKTGAAGSLMDVLHYPGMNH RVEITEGILADECAALLCYFFRMPRQVFNAQKKAQSSTD (SEQ ID NO: 1), or a fragment thereof lacking only the N-terminal methionine, wherein the one or more amino acid alterations comprises or consists of a set of alterations selected from the group consisting of:
a) I76Y, V82T, Y123H, Y147R, and Q154R;
b) I76Y, V82T, Y123H, Y147R, F149Y, and Q154R; and
c) I76Y, V82T, Y123H, Y147D, F149Y, Q154R, T166I, and D167N.

7. The method of claim 6, wherein the alteration to the nucleobase in codon 408 of the PAH polynucleotide results in a W408R amino acid alteration in a PAH polypeptide encoded by the PAH polynucleotide.

8. The method of claim 6, wherein the base editor comprises an amino acid sequence having at least 85% sequence identity to a sequence selected from those listed in Table 2.

9. The method of claim 6, wherein the guide RNA comprises a spacer comprising at least 10 contiguous nucleotides of a spacer sequence selected from those listed in Table 1.

10. The method of claim 6, wherein the one or more polynucleotides encoding the base editor comprise an RNA sequence encoding a polypeptide having at least 85% sequence identity to an amino acid sequence selected from those listed in Table 2.

11. A modified cell comprising an alteration in a nucleobase of an PAH polynucleotide, wherein the alteration is prepared by the method of claim 1, and wherein the alteration increases activity of the encoded PAH polypeptide as compared to a control cell without the alteration.

12. A base editor system comprising a base editor or one or more polynucleotides encoding the base editor, wherein the base editor comprises a nucleic acid programmable DNA binding protein domain (napDNAbp) and a deaminase domain, and a guide RNA that targets said base editor to effect an alteration to a nucleobase in codon 408 of a PAH polynucleotide, wherein the deaminase domain comprises or consists of the following amino acid sequence with one or more amino acid alterations MSEVEFSHEYWMRHALTLAKRARDEREVPVGAVLVLNNRVIGEGWNRAIGLHDPTAHAEIMALR QGGLVMQNYRLIDATLYVTFEPCVMCAGAMIHSRIGRVVFGVRNAKTGAAGSLMDVLHYPGMNH RVEITEGILADECAALLCYFFRMPRQVFNAQKKAQSSTD (SEQ ID NO: 1), or a fragment thereof lacking only the N-terminal methionine, wherein the one or more amino acid alterations comprises or consists of a set of alterations selected from the group consisting of:
a) I76Y, V82T, Y123H, Y147R, and Q154R;
b) I76Y, V82T, Y123H, Y147R, F149Y, and Q154R; and
c) I76Y, V82T, Y123H, Y147D, F149Y, Q154R, T166I, and D167N.

13. The base editor system of claim 12, wherein the alteration to the nucleobase in codon 408 of the PAH polynucleotide results in a W408R amino acid alteration in a PAH polypeptide encoded by the PAH polynucleotide.

14. The base editor system of claim 12, wherein the base editor comprises an amino acid sequence having at least 85% sequence identity to a sequence selected from those listed in Table 2.

15. The base editor system of claim 12, wherein the guide RNA comprises a spacer comprising at least 10 contiguous nucleotides of a spacer sequence selected from those listed in Table 1.

16. The base editor system of claim 12, wherein the one or more polynucleotides encoding the base editor comprise an RNA sequence encoding a polypeptide having at least 85% sequence identity to an amino acid sequence selected from those listed in Table 2.

17. A set of polynucleotides encoding the base editor system of claim 12, or a component thereof.

18. A lipid nanoparticle comprising the base editor system of claim 12.

19. A pharmaceutical composition comprising the base editor system of claim 12, and a pharmaceutically acceptable excipient.

20. A kit comprising the base editor system comprising the base editor system of claim 12, wherein the kit further comprises a container.

21. A guide RNA comprising a sequence listed in Table 1.

The application's sequence listing, which the Patent Office published only in electronic form, follows.

SEQUENCE LISTING (661 sequences)

SEQ ID NO: 1 - protein, 167 aa, Escherichia coli
  REGION 1..167: note = misc_feature - TadA*7.10 (ecTadA) polypeptide sequence
MSEVEFSHEYWMRHALTLAKRARDEREVPVGAVLVLNNRVIGEGWNRAIGLHDPTAHAEIMALRQGGLVMQNYRLIDATLYVTFEPCVMCAGAMIHSRIGRVVFGVRNAKTGAAGSLMDVLHYPGMNHRVEITEGILADECAALLCYFFRMPRQVFNAQKKAQSSTD

SEQ ID NO: 2 - DNA, 4092 bp, synthetic construct
  misc_feature 1..4092: note = BhCas12b GGSGGS-ABE8-Xten20at P153 polynucleotide sequence
  misc_feature 1..6: note = Kozak sequence
  misc_feature 7..57: note = Sequence encoding N-terminal nuclear localization signal
  misc_feature 58..513: note = Sequence encoding BhCas12b
  misc_feature 514..531: note = Sequence encoding a linker
  misc_feature 532..1029: note = Sequence encoding TadA*8
  misc_feature 1030..1089: note = Sequence encoding Xten20 linker
  misc_feature 1090..3954: note = Sequence encoding BhCas12b
  misc_feature 3955..4002: note = Sequence encoding C-terminal NLS
  misc_feature 4003..4008: note = Sequence encoding GS linker
  misc_feature 4009..4089: note = Sequence encoding 3x hemagglutinin (HA) tag
  source 1..4092: mol_type = other DNA
gccaccatggccccaaagaagaagcggaaggtcggtatccacggagtcccagcagccgccaccagatccttcatcctgaagatcgagcccaacgaggaagtgaagaaaggcctctggaaaacccacgaggtgctgaaccacggaatcgcctactacatgaatatcctgaagctgatccggcaagaggccatctacgagcaccacgagcaggaccccaagaatcccaagaaggtgtccaaggccgagatccaggccgagctgtgggatttcgtgctgaagatgcagaagtgcaacagcttcacacacgaggtggacaaggacgaggtgttcaacatcctgagagagctgtacgaggaactggtgcccagcagcgtggaaaagaagggcgaagccaaccagctgagcaacaagtttctgtaccctctggtggaccccaacagccagtctggaaagggaacagccagcagcggcagaaagcccagatggtacaacctgaagattgccggcgatcccggaggctctggaggaagctccgaagtcgagttttcccatgagtactggatgagacacgcattgactctcgcaaagagggctcgagatgaacgcgaggtgcccgtgggggcagtactcgtgctcaacaatcgcgtaatcggcgaaggttggaatagggcaatcggactccacgaccccactgcacatgcggaaatcatggcccttcgacagggagggcttgtgatgcagaattatcgactttatgatgcgacgctgtacgtcacgtttgaaccttgcgtaatgtgcgcgggagctatgattcactcccgcattggacgagttgtattcggtgttcgcaacgccaagacgggtgccgcaggttcactgatggacgtgctgcatcatccaggcatgaaccaccgggtagaaatcacagaaggcatattggcggacgaatgtgcggcgctgttgtgtcgtttttttcgcatgcccaggcgggtctttaacgcccagaaaaaagcacaatcctctactgacggctcttctggatctgaaacacctggcacaagcgagagcgccacccctgagagctctggctcctgggaagaagagaagaagaagtgggaagaagataagaaaaaggacccgctggccaagatcctgggcaagctggctgagtacggactgatccctctgttcatcccctacaccgacagcaacgagcccatcgtgaaagaaatcaagtggatggaaaagtcccggaaccagagcgtgcggcggctggataaggacatgttcattcaggccctggaacggttcctgagctgggagagctggaacctgaaagtgaaagaggaatacgagaaggtcgagaaagagtacaagaccctggaagagaggatcaaagaggacatccaggctctgaaggctctggaacagtatgagaaagagcggcaagaacagctgctgcgggacaccctgaacaccaacgagtaccggctgagcaagagaggccttagaggctggcgggaaatcatccagaaatggctgaaaatggacgagaacgagccctccgagaagtacctggaagtgttcaaggactaccagcggaagcaccctagagaggccggcgattacagcgtgtacgagttcctgtccaagaaagagaaccacttcatctggcggaatcaccctgagtacccctacctgtacgccaccttctgcgagatcgacaagaaaaagaaggacgccaagcagcaggccaccttcacactggccgatcctatcaatcaccctctgtgggtccgattcgaggaaagaagcggcagcaacctgaacaagtacagaatcctgaccgagcagctgcacaccgagaagctgaagaaaaagctgacagtgcagctggaccggctgatctaccctacagaatctggcggctgggaagagaagggcaaagtggacattgtgctgctgcccagccggcagttctacaaccagatcttcctggacatcgaggaaaagggcaagcacgccttcacctacaaggatgagagcatcaagttccctctgaagggcacactcggcggagccagagtgcagttcgacagagatcacctgagaagataccctcacaaggtggaaagcggcaacgtgggcagaatctacttcaacatgaccgtgaacatcgagcctacagagtccccagtgtccaagtctctgaagatccaccgggacgacttccccaaggtggtcaacttcaagcccaaagaactgaccgagtggatcaaggacagcaagggcaagaaactgaagtccggcatcgagtccctggaaatcggcctgagagtgatgagcatcgacctgggacagagacaggccgctgccgcctctattttcgaggtggtggatcagaagcccgacatcgaaggcaagctgtttttcccaatcaagggcaccgagctgtatgccgtgcacagagccagcttcaacatcaagctgcccggcgagacactggtcaagagcagagaagtgctgcggaaggccagagaggacaatctgaaactgatgaaccagaagctcaacttcctgcggaacgtgctgcacttccagcagttcgaggacatcaccgagagagagaagcgggtcaccaagtggatcagcagacaagagaacagcgacgtgcccctggtgtaccaggatgagctgatccagatccgcgagctgatgtacaagccttacaaggactgggtcgccttcctgaagcagctccacaagagactggaagtcgagatcggcaaagaagtgaagcactggcggaagtccctgagcgacggaagaaagggcctgtacggcatctccctgaagaacatcgacgagatcgatcggacccggaagttcctgctgagatggtccctgaggcctaccgaacctggcgaagtgcgtagactggaacccggccagagattcgccatcgaccagctgaatcacctgaacgccctgaaagaagatcggctgaagaagatggccaacaccatcatcatgcacgccctgggctactgctacgacgtgcggaagaagaaatggcaggctaagaaccccgcctgccagatcatcctgttcgaggatctgagcaactacaacccctacgaggaaaggtcccgcttcgagaacagcaagctcatgaagtggtccagacgcgagatccccagacaggttgcactgcagggcgagatctatggcctgcaagtgggagaagtgggcgctcagttcagcagcagattccacgccaagacaggcagccctggcatcagatgtagcgtcgtgaccaaagagaagctgcaggacaatcggttcttcaagaatctgcagagagagggcagactgaccctggacaaaatcgccgtgctgaaagagggcgatctgtacccagacaaaggcggcgagaagttcatcagcctgagcaaggatcggaagtgcgtgaccacacacgccgacatcaacgccgctcagaacctgcagaagcggttctggacaagaacccacggcttctacaaggtgtactgcaaggcctaccaggtggacggccagaccgtgtacatccctgagagcaaggaccagaagcagaagatcatcgaagagttcggcgagggctacttcattctgaaggacggggtgtacgaatgggtcaacgccggcaagctgaaaatcaagaagggcagctccaagcagagcagcagcgagctggtggatagcgacatcctgaaagacagcttcgacctggcctccgagctgaaaggcgaaaagctgatgctgtacagggaccccagcggcaatgtgttccccagcgacaaatggatggccgctggcgtgttcttcggaaagctggaacgcatcctgatcagcaagctgaccaaccagtactccatcagcaccatcgaggacgacagcagcaagcagtctatgaaaaggccggcggccacgaaaaaggccggccaggcaaaaaagaaaaagggatcctacccatacgatgttccagattacgcttatccctacgacgtgcctgattatgcatacccatatgatgtccccgactatgcctaa

SEQ ID NO: 3 - protein, 1361 aa, synthetic construct
  REGION 1..1361: note = BhCas12b GGSGGS-ABE8-Xten20at P153 polypeptide sequence
MAPKKKRKVGIHGVPAAATRSFILKIEPNEEVKKGLWKTHEVLNHGIAYYMNILKLIRQEAIYEHHEQDPKNPKKVSKAEIQAELWDFVLKMQKCNSFTHEVDKDEVFNILRELYEELVPSSVEKKGEANQLSNKFLYPLVDPNSQSGKGTASSGRKPRWYNLKIAGDPGGSGGSSEVEFSHEYWMRHALTLAKRARDEREVPVGAVLVLNNRVIGEGWNRAIGLHDPTAHAEIMALRQGGLVMQNYRLYDATLYVTFEPCVMCAGAMIHSRIGRVVFGVRNAKTGAAGSLMDVLHHPGMNHRVEITEGILADECAALLCRFFRMPRRVFNAQKKAQSSTDGSSGSETPGTSESATPESSGSWEEEKKKWEEDKKKDPLAKILGKLAEYGLIPLFIPYTDSNEPIVKEIKWMEKSRNQSVRRLDKDMFIQALERFLSWESWNLKVKEEYEKVEKEYKTLEERIKEDIQALKALEQYEKERQEQLLRDTLNTNEYRLSKRGLRGWREIIQKWLKMDENEPSEKYLEVFKDYQRKHPREAGDYSVYEFLSKKENHFIWRNHPEYPYLYATFCEIDKKKKDAKQQATFTLADPINHPLWVRFEERSGSNLNKYRILTEQLHTEKLKKKLTVQLDRLIYPTESGGWEEKGKVDIVLLPSRQFYNQIFLDIEEKGKHAFTYKDESIKFPLKGTLGGARVQFDRDHLRRYPHKVESGNVGRIYFNMTVNIEPTESPVSKSLKIHRDDFPKVVNFKPKELTEWIKDSKGKKLKSGIESLEIGLRVMSIDLGQRQAAAASIFEVVDQKPDIEGKLFFPIKGTELYAVHRASFNIKLPGETLVKSREVLRKAREDNLKLMNQKLNFLRNVLHFQQFEDITEREKRVTKWISRQENSDVPLVYQDELIQIRELMYKPYKDWVAFLKQLHKRLEVEIGKEVKHWRKSLSDGRKGLYGISLKNIDEIDRTRKFLLRWSLRPTEPGEVRRLEPGQRFAIDQLNHLNALKEDRLKKMANTIIMHALGYCYDVRKKKWQAKNPACQIILFEDLSNYNPYEERSRFENSKLMKWSRREIPRQVALQGEIYGLQVGEVGAQFSSRFHAKTGSPGIRCSVVTKEKLQDNRFFKNLQREGRLTLDKIAVLKEGDLYPDKGGEKFISLSKDRKCVTTHADINAAQNLQKRFWTRTHGFYKVYCKAYQVDGQTVYIPESKDQKQKIIEEFGEGYFILKDGVYEWVNAGKLKIKKGSSKQSSSELVDSDILKDSFDLASELKGEKLMLYRDPSGNVFPSDKWMAAGVFFGKLERILISKLTNQYSISTIEDDSSKQSMKRPAATKKAGQAKKKKGSYPYDVPDYAYPYDVPDYAYPYDVPDYA

SEQ ID NO: 4 - DNA, 4092 bp, synthetic construct
  misc_feature 1..4092: note = BhCas12b GGSGGS-ABE8-Xten20at K255 polynucleotide sequence
  misc_feature 1..6: note = Kozak sequence
  misc_feature 7..57: note = Sequence encoding N-terminal nuclear localization signal (NLS)
  misc_feature 58..822: note = Sequence encoding BhCas12b
  misc_feature 823..840: note = Sequence encoding a linker
  misc_feature 841..1338: note = Sequence encoding TadA*8
  misc_feature 1339..1398: note = Sequence encoding Xten20 linker
  misc_feature 1399..3954: note = Sequence encoding BhCas12b
  misc_feature 3955..4002: note = Sequence encoding C-terminal NLS
  misc_feature 4003..4008: note = Sequence encoding a GS linker
  misc_feature 4009..4089: note = Sequence encoding 3x hemagglutinin (HA) tag
  source 1..4092: mol_type = other DNA
gccaccatggccccaaagaagaagcggaaggtcggtatccacggagtcccagcagccgccaccagatccttcatcctgaagatcgagcccaacgaggaagtgaagaaaggcctctggaaaacccacgaggtgctgaaccacggaatcgcctactacatgaatatcctgaagctgatccggcaagaggccatctacgagcaccacgagcaggaccccaagaatcccaagaaggtgtccaaggccgagatccaggccgagctgtgggatttcgtgctgaagatgcagaagtgcaacagcttcacacacgaggtggacaaggacgaggtgttcaacatcctgagagagctgtacgaggaactggtgcccagcagcgtggaaaagaagggcgaagccaaccagctgagcaacaagtttctgtaccctctggtggaccccaacagccagtctggaaagggaacagccagcagcggcagaaagcccagatggtacaacctgaagattgccggcgatccctcctgggaagaagagaagaagaagtgggaagaagataagaaaaaggacccgctggccaagatcctgggcaagctggctgagtacggactgatccctctgttcatcccctacaccgacagcaacgagcccatcgtgaaagaaatcaagtggatggaaaagtcccggaaccagagcgtgcggcggctggataaggacatgttcattcaggccctggaacggttcctgagctgggagagctggaacctgaaagtgaaagaggaatacgagaaggtcgagaaagagtacaagaccctggaagagaggatcaaaggaggctctggaggaagctccgaagtcgagttttcccatgagtactggatgagacacgcattgactctcgcaaagagggctcgagatgaacgcgaggtgcccgtgggggcagtactcgtgctcaacaatcgcgtaatcggcgaaggttggaatagggcaatcggactccacgaccccactgcacatgcggaaatcatggcccttcgacagggagggcttgtgatgcagaattatcgactttatgatgcgacgctgtacgtcacgtttgaaccttgcgtaatgtgcgcgggagctatgattcactcccgcattggacgagttgtattcggtgttcgcaacgccaagacgggtgccgcaggttcactgatggacgtgctgcatcatccaggcatgaaccaccgggtagaaatcacagaaggcatattggcggacgaatgtgcggcgctgttgtgtcgtttttttcgcatgcccaggcgggtctttaacgcccagaaaaaagcacaatcctctactgacggctcttctggatctgaaacacctggcacaagcgagagcgccacccctgagagctctggcgaggacatccaggctctgaaggctctggaacagtatgagaaagagcggcaagaacagctgctgcgggacaccctgaacaccaacgagtaccggctgagcaagagaggccttagaggctggcgggaaatcatccagaaatggctgaaaatggacgagaacgagccctccgagaagtacctggaagtgttcaaggactaccagcggaagcaccctagagaggccggcgattacagcgtgtacgagttcctgtccaagaaagagaaccacttcatctggcggaatcaccctgagtacccctacctgtacgccaccttctgcgagatcgacaagaaaaagaaggacgccaagcagcaggccaccttcacactggccgatcctatcaatcaccctctgtgggtccgattcgaggaaagaagcggcagcaacctgaacaagtacagaatcctgaccgagcagctgcacaccgagaagctgaagaaaaagctgacagtgcagctggaccggctgatctaccctacagaatctggcggctgggaagagaagggcaaagtggacattgtgctgctgcccagccggcagttctacaaccagatcttcctggacatcgaggaaaagggcaagcacgccttcacctacaaggatgagagcatcaagttccctctgaagggcacactcggcggagccagagtgcagttcgacagagatcacctgagaagataccctcacaaggtggaaagcggcaacgtgggcagaatctacttcaacatgaccgtgaacatcgagcctacagagtccccagtgtccaagtctctgaagatccaccgggacgacttccccaaggtggtcaacttcaagcccaaagaactgaccgagtggatcaaggacagcaagggcaagaaactgaagtccggcatcgagtccctggaaatcggcctgagagtgatgagcatcgacctgggacagagacaggccgctgccgcctctattttcgaggtggtggatcagaagcccgacatcgaaggcaagctgtttttcccaatcaagggcaccgagctgtatgccgtgcacagagccagcttcaacatcaagctgcccggcgagacactggtcaagagcagagaagtgctgcggaaggccagagaggacaatctgaaactgatgaaccagaagctcaacttcctgcggaacgtgctgcacttccagcagttcgaggacatcaccgagagagagaagcgggtcaccaagtggatcagcagacaagagaacagcgacgtgcccctggtgtaccaggatgagctgatccagatccgcgagctgatgtacaagccttacaaggactgggtcgccttcctgaagcagctccacaagagactggaagtcgagatcggcaaagaagtgaagcactggcggaagtccctgagcgacggaagaaagggcctgtacggcatctccctgaagaacatcgacgagatcgatcggacccggaagttcctgctgagatggtccctgaggcctaccgaacctggcgaagtgcgtagactggaacccggccagagattcgccatcgaccagctgaatcacctgaacgccctgaaagaagatcggctgaagaagatggccaacaccatcatcatgcacgccctgggctactgctacgacgtgcggaagaagaaatggcaggctaagaaccccgcctgccagatcatcctgttcgaggatctgagcaactacaacccctacgaggaaaggtcccgcttcgagaacagcaagctcatgaagtggtccagacgcgagatccccagacaggttgcactgcagggcgagatctatggcctgcaagtgggagaagtgggcgctcagttcagcagcagattccacgccaagacaggcagccctggcatcagatgtagcgtcgtgaccaaagagaagctgcaggacaatcggttcttcaagaatctgcagagagagggcagactgaccctggacaaaatcgccgtgctgaaagagggcgatctgtacccagacaaaggcggcgagaagttcatcagcctgagcaaggatcggaagtgcgtgaccacacacgccgacatcaacgccgctcagaacctgcagaagcggttctggacaagaacccacggcttctacaaggtgtactgcaaggcctaccaggtggacggccagaccgtgtacatccctgagagcaaggaccagaagcagaagatcatcgaagagttcggcgagggctacttcattctgaaggacggggtgtacgaatgggtcaacgccggcaagctgaaaatcaagaagggcagctccaagcagagcagcagcgagctggtggatagcgacatcctgaaagacagcttcgacctggcctccgagctgaaaggcgaaaagctgatgctgtacagggaccccagcggcaatgtgttccccagcgacaaatggatggccgctggcgtgttcttcggaaagctggaacgcatcctgatcagcaagctgaccaaccagtactccatcagcaccatcgaggacgacagcagcaagcagtctatgaaaaggccggcggccacgaaaaaggccggccaggcaaaaaagaaaaagggatcctacccatacgatgttccagattacgcttatccctacgacgtgcctgattatgcatacccatatgatgtccccgactatgcctaa

SEQ ID NO: 5 - protein, 1361 aa, synthetic construct
  REGION 1..1361: note = BhCas12b GGSGGS-ABE8-Xten20at K255 polypeptide sequence
MAPKKKRKVGIHGVPAAATRSFILKIEPNEEVKKGLWKTHEVLNHGIAYYMNILKLIRQEAIYEHHEQDPKNPKKVSKAEIQAELWDFVLKMQKCNSFTHEVDKDEVFNILRELYEELVPSSVEKKGEANQLSNKFLYPLVDPNSQSGKGTASSGRKPRWYNLKIAGDPSWEEEKKKWEEDKKKDPLAKILGKLAEYGLIPLFIPYTDSNEPIVKEIKWMEKSRNQSVRRLDKDMFIQALERFLSWESWNLKVKEEYEKVEKEYKTLEERIKGGSGGSSEVEFSHEYWMRHALTLAKRARDEREVPVGAVLVLNNRVIGEGWNRAIGLHDPTAHAEIMALRQGGLVMQNYRLYDATLYVTFEPCVMCAGAMIHSRIGRVVFGVRNAKTGAAGSLMDVLHHPGMNHRVEITEGILADECAALLCRFFRMPRRVFNAQKKAQSSTDGSSGSETPGTSESATPESSGEDIQALKALEQYEKERQEQLLRDTLNTNEYRLSKRGLRGWREIIQKWLKMDENEPSEKYLEVFKDYQRKHPREAGDYSVYEFLSKKENHFIWRNHPEYPYLYATFCEIDKKKKDAKQQATFTLADPINHPLWVRFEERSGSNLNKYRILTEQLHTEKLKKKLTVQLDRLIYPTESGGWEEKGKVDIVLLPSRQFYNQIFLDIEEKGKHAFTYKDESIKFPLKGTLGGARVQFDRDHLRRYPHKVESGNVGRIYFNMTVNIEPTESPVSKSLKIHRDDFPKVVNFKPKELTEWIKDSKGKKLKSGIESLEIGLRVMSIDLGQRQAAAASIFEVVDQKPDIEGKLFFPIKGTELYAVHRASFNIKLPGETLVKSREVLRKAREDNLKLMNQKLNFLRNVLHFQQFEDITEREKRVTKWISRQENSDVPLVYQDELIQIRELMYKPYKDWVAFLKQLHKRLEVEIGKEVKHWRKSLSDGRKGLYGISLKNIDEIDRTRKFLLRWSLRPTEPGEVRRLEPGQRFAIDQLNHLNALKEDRLKKMANTIIMHALGYCYDVRKKKWQAKNPACQIILFEDLSNYNPYEERSRFENSKLMKWSRREIPRQVALQGEIYGLQVGEVGAQFSSRFHAKTGSPGIRCSVVTKEKLQDNRFFKNLQREGRLTLDKIAVLKEGDLYPDKGGEKFISLSKDRKCVTTHADINAAQNLQKRFWTRTHGFYKVYCKAYQVDGQTVYIPESKDQKQKIIEEFGEGYFILKDGVYEWVNAGKLKIKKGSSKQSSSELVDSDILKDSFDLASELKGEKLMLYRDPSGNVFPSDKWMAAGVFFGKLERILISKLTNQYSISTIEDDSSKQSMKRPAATKKAGQAKKKKGSYPYDVPDYAYPYDVPDYAYPYDVPDYA

SEQ ID NO: 6 - DNA, 4092 bp, synthetic construct
  misc_feature 1..4092: note = BhCas12b GGSGGS-ABE8-Xten20at D306 polynucleotide sequence
  misc_feature 1..6: note = Kozak sequence
  misc_feature 7..57: note = Sequence encoding N-terminal nuclear localization signal (NLS)
  misc_feature 58..975: note = Sequence encoding BhCas12b
  misc_feature 976..993: note = Sequence encoding a linker
  misc_feature 994..1491: note = Sequence encoding TadA*8
  misc_feature 1492..1551: note = Sequence encoding Xten20 linker
  misc_feature 1552..3954: note = Sequence encoding BhCas12b
  misc_feature 3955..4002: note = Sequence encoding C-terminal NLS
  misc_feature 4003..4008: note = Sequence encoding a GS linker
  misc_feature 4009..4089: note = Sequence encoding 3x hemagglutinin (HA) tag
  source 1..4092: mol_type = other DNA
gccaccatggccccaaagaagaagcggaaggtcggtatccacggagtcccagcagccgccaccagatccttcatcctgaagatcgagcccaacgaggaagtgaagaaaggcctctggaaaacccacgaggtgctgaaccacggaatcgcctactacatgaatatcctgaagctgatccggcaagaggccatctacgagcaccacgagcaggaccccaagaatcccaagaaggtgtccaaggccgagatccaggccgagctgtgggatttcgtgctgaagatgcagaagtgcaacagcttcacacacgaggtggacaaggacgaggtgttcaacatcctgagagagctgtacgaggaactggtgcccagcagcgtggaaaagaagggcgaagccaaccagctgagcaacaagtttctgtaccctctggtggaccccaacagccagtctggaaagggaacagccagcagcggcagaaagcccagatggtacaacctgaagattgccggcgatccctcctgggaagaagagaagaagaagtgggaagaagataagaaaaaggacccgctggccaagatcctgggcaagctggctgagtacggactgatccctctgttcatcccctacaccgacagcaacgagcccatcgtgaaagaaatcaagtggatggaaaagtcccggaaccagagcgtgcggcggctggataaggacatgttcattcaggccctggaacggttcctgagctgggagagctggaacctgaaagtgaaagaggaatacgagaaggtcgagaaagagtacaagaccctggaagagaggatcaaagaggacatccaggctctgaaggctctggaacagtatgagaaagagcggcaagaacagctgctgcgggacaccctgaacaccaacgagtaccggctgagcaagagaggccttagaggctggcgggaaatcatccagaaatggctgaaaatggacggaggctctggaggaagctccgaagtcgagttttcccatgagtactggatgagacacgcattgactctcgcaaagagggctcgagatgaacgcgaggtgcccgtgggggcagtactcgtgctcaacaatcgcgtaatcggcgaaggttggaatagggcaatcggactccacgaccccactgcacatgcggaaatcatggcccttcgacagggagggcttgtgatgcagaattatcgactttatgatgcgacgctgtacgtcacgtttgaaccttgcgtaatgtgcgcgggagctatgattcactcccgcattggacgagttgtattcggtgttcgcaacgccaagacgggtgccgcaggttcactgatggacgtgctgcatcatccaggcatgaaccaccgggtagaaatcacagaaggcatattggcggacgaatgtgcggcgctgttgtgtcgtttttttcgcatgcccaggcgggtctttaacgcccagaaaaaagcacaatcctctactgacggctcttctggatctgaaacacctggcacaagcgagagcgccacccctgagagctctggcgagaacgagccctccgagaagtacctggaagtgttcaaggactaccagcggaagcaccctagagaggccggcgattacagcgtgtacgagttcctgtccaagaaagagaaccacttcatctggcggaatcaccctgagtacccctacctgtacgccaccttctgcgagatcgacaagaaaaagaaggacgccaagcagcaggccaccttcacactggccgatcctatcaatcaccctctgtgggtccgattcgaggaaagaagcggcagcaacctgaacaagtacagaatcctgaccgagcagctgcacaccgagaagctgaagaaaaagctgacagtgcagctggaccggctgatctaccctacagaatctggcggctgggaagagaagggcaaagtggacattgtgctgctgcccagccggcagttctacaaccagatcttcctggacatcgaggaaaagggcaagcacgccttcacctacaaggatgagagcatcaagttccctctgaagggcacactcggcggagccagagtgcagttcgacagagatcacctgagaagataccctcacaaggtggaaagcggcaacgtgggcagaatctacttcaacatgaccgtgaacatcgagcctacagagtccccagtgtccaagtctctgaagatccaccgggacgacttccccaaggtggtcaacttcaagcccaaagaactgaccgagtggatcaaggacagcaagggcaagaaactgaagtccggcatcgagtccctggaaatcggcctgagagtgatgagcatcgacctgggacagagacaggccgctgccgcctctattttcgaggtggtggatcagaagcccgacatcgaaggcaagctgtttttcccaatcaagggcaccgagctgtatgccgtgcacagagccagcttcaacatcaagctgcccggcgagacactggtcaagagcagagaagtgctgcggaaggccagagaggacaatctgaaactgatgaaccagaagctcaacttcctgcggaacgtgctgcacttccagcagttcgaggacatcaccgagagagagaagcgggtcaccaagtggatcagcagacaagagaacagcgacgtgcccctggtgtaccaggatgagctgatccagatccgcgagctgatgtacaagccttacaaggactgggtcgccttcctgaagcagctccacaagagactggaagtcgagatcggcaaagaagtgaagcactggcggaagtccctgagcgacggaagaaagggcctgtacggcatctccctgaagaacatcgacgagatcgatcggacccggaagttcctgctgagatggtccctgaggcctaccgaacctggcgaagtgcgtagactggaacccggccagagattcgccatcgaccagctgaatcacctgaacgccctgaaagaagatcggctgaagaagatggccaacaccatcatcatgcacgccctgggctactgctacgacgtgcggaagaagaaatggcaggctaagaaccccgcctgccagatcatcctgttcgaggatctgagcaactacaacccctacgaggaaaggtcccgcttcgagaacagcaagctcatgaagtggtccagacgcgagatccccagacaggttgcactgcagggcgagatctatggcctgcaagtgggagaagtgggcgctcagttcagcagcagattccacgccaagacaggcagccctggcatcagatgtagcgtcgtgaccaaagagaagctgcaggacaatcggttcttcaagaatctgcagagagagggcagactgaccctggacaaaatcgccgtgctgaaagagggcgatctgtacccagacaaaggcggcgagaagttcatcagcctgagcaaggatcggaagtgcgtgaccacacacgccgacatcaacgccgctcagaacctgcagaagcggttctggacaagaacccacggcttctacaaggtgtactgcaaggcctaccaggtggacggccagaccgtgtacatccctgagagcaaggaccagaagcagaagatcatcgaagagttcggcgagggctacttcattctgaaggacggggtgtacgaatgggtcaacgccggcaagctgaaaatcaagaagggcagctccaagcagagcagcagcgagctggtggatagcgacatcctgaaagacagcttcgacctggcctccgagctgaaaggcgaaaagctgatgctgtacagggaccccagcggcaatgtgttccccagcgacaaatggatggccgctggcgtgttcttcggaaagctggaacgcatcctgatcagcaagctgaccaaccagtactccatcagcaccatcgaggacgacagcagcaagcagtctatgaaaaggccggcggccacgaaaaaggccggccaggcaaaaaagaaaaagggatcctacccatacgatgttccagattacgcttatccctacgacgtgcctgattatgcatacccatatgatgtccccgactatgcctaa

SEQ ID NO: 7 - protein, 1361 aa, synthetic construct
  REGION 1..1361: note = BhCas12b GGSGGS-ABE8-Xten20at D306 polypeptide sequence
MAPKKKRKVGIHGVPAAATRSFILKIEPNEEVKKGLWKTHEVLNHGIAYYMNILKLIRQEAIYEHHEQDPKNPKKVSKAEIQAELWDFVLKMQKCNSFTHEVDKDEVFNILRELYEELVPSSVEKKGEANQLSNKFLYPLVDPNSQSGKGTASSGRKPRWYNLKIAGDPSWEEEKKKWEEDKKKDPLAKILGKLAEYGLIPLFIPYTDSNEPIVKEIKWMEKSRNQSVRRLDKDMFIQALERFLSWESWNLKVKEEYEKVEKEYKTLEERIKEDIQALKALEQYEKERQEQLLRDTLNTNEYRLSKRGLRGWREIIQKWLKMDGGSGGSSEVEFSHEYWMRHALTLAKRARDEREVPVGAVLVLNNRVIGEGWNRAIGLHDPTAHAEIMALRQGGLVMQNYRLYDATLYVTFEPCVMCAGAMIHSRIGRVVFGVRNAKTGAAGSLMDVLHHPGMNHRVEITEGILADECAALLCRFFRMPRRVFNAQKKAQSSTDGSSGSETPGTSESATPESSGENEPSEKYLEVFKDYQRKHPREAGDYSVYEFLSKKENHFIWRNHPEYPYLYATFCEIDKKKKDAKQQATFTLADPINHPLWVRFEERSGSNLNKYRILTEQLHTEKLKKKLTVQLDRLIYPTESGGWEEKGKVDIVLLPSRQFYNQIFLDIEEKGKHAFTYKDESIKFPLKGTLGGARVQFDRDHLRRYPHKVESGNVGRIYFNMTVNIEPTESPVSKSLKIHRDDFPKVVNFKPKELTEWIKDSKGKKLKSGIESLEIGLRVMSIDLGQRQAAAASIFEVVDQKPDIEGKLFFPIKGTELYAVHRASFNIKLPGETLVKSREVLRKAREDNLKLMNQKLNFLRNVLHFQQFEDITEREKRVTKWISRQENSDVPLVYQDELIQIRELMYKPYKDWVAFLKQLHKRLEVEIGKEVKHWRKSLSDGRKGLYGISLKNIDEIDRTRKFLLRWSLRPTEPGEVRRLEPGQRFAIDQLNHLNALKEDRLKKMANTIIMHALGYCYDVRKKKWQAKNPACQIILFEDLSNYNPYEERSRFENSKLMKWSRREIPRQVALQGEIYGLQVGEVGAQFSSRFHAKTGSPGIRCSVVTKEKLQDNRFFKNLQREGRLTLDKIAVLKEGDLYPDKGGEKFISLSKDRKCVTTHADINAAQNLQKRFWTRTHGFYKVYCKAYQVDGQTVYIPESKDQKQKIIEEFGEGYFILKDGVYEWVNAGKLKIKKGSSKQSSSELVDSDILKDSFDLASELKGEKLMLYRDPSGNVFPSDKWMAAGVFFGKLERILISKLTNQYSISTIEDDSSKQSMKRPAATKKAGQAKKKKGSYPYDVPDYAYPYDVPDYAYPYDVPDYA

SEQ ID NO: 8 - DNA, 4092 bp, synthetic construct
  misc_feature 1..4092: note = BhCas12b GGSGGS-ABE8-Xten20at D980 polynucleotide sequence
  misc_feature 1..6: note = Kozak sequence
  misc_feature 7..57: note = Sequence encoding N-terminal nuclear localization signal (NLS)
  misc_feature 58..2997: note = Sequence encoding BhCas12b
  misc_feature 2998..3015: note = Sequence encoding a linker
  misc_feature 3016..3513: note = Sequence encoding TadA*8
  misc_feature 3514..3573: note = Sequence encoding Xten20 linker
  misc_feature 3574..3954: note = Sequence encoding BhCas12b
  misc_feature 3955..4002: note = Sequence encoding C-terminal NLS
  misc_feature 4003..4008: note = Sequence encoding a GS linker
  misc_feature 4009..4089: note = Sequence encoding 3x hemagglutinin (HA) tag
  source 1..4092: mol_type = other DNA
gccaccatggccccaaagaagaagcggaaggtcggtatccacggagtcccagcagccgccaccagatccttcatcctgaagatcgagcccaacgaggaagtgaagaaaggcctctggaaaacccacgaggtgctgaaccacggaatcgcctactacatgaatatcctgaagctgatccggcaagaggccatctacgagcaccacgagcaggaccccaagaatcccaagaaggtgtccaaggccgagatccaggccgagctgtgggatttcgtgctgaagatgcagaagtgcaacagcttcacacacgaggtggacaaggacgaggtgttcaacatcctgagagagctgtacgaggaactggtgcccagcagcgtggaaaagaagggcgaagccaaccagctgagcaacaagtttctgtaccctctggtggaccccaacagccagtctggaaagggaacagccagcagcggcagaaagcccagatggtacaacctgaagattgccggcgatccctcctgggaagaagagaagaagaagtgggaagaagataagaaaaaggacccgctggccaagatcctgggcaagctggctgagtacggactgatccctctgttcatcccctacaccgacagcaacgagcccatcgtgaaagaaatcaagtggatggaaaagtcccggaaccagagcgtgcggcggctggataaggacatgttcattcaggccctggaacggttcctgagctgggagagctggaacctgaaagtgaaagaggaatacgagaaggtcgagaaagagtacaagaccctggaagagaggatcaaagaggacatccaggctctgaaggctctggaacagtatgagaaagagcggcaagaacagctgctgcgggacaccctgaacaccaacgagtaccggctgagcaagagaggccttagaggctggcgggaaatcatccagaaatggctgaaaatggacgagaacgagccctccgagaagtacctggaagtgttcaaggactaccagcggaagcaccctagagaggccggcgattacagcgtgtacgagttcctgtccaagaaagagaaccacttcatctggcggaatcaccctgagtacccctacctgtacgccaccttctgcgagatcgacaagaaaaagaaggacgccaagcagcaggccaccttcacactggccgatcctatcaatcaccctctgtgggtccgattcgaggaaagaagcggcagcaacctgaacaagtacagaatcctgaccgagcagctgcacaccgagaagctgaagaaaaagctgacagtgcagctggaccggctgatctaccctacagaatctggcggctgggaagagaagggcaaagtggacattgtgctgctgcccagccggcagttctacaaccagatcttcctggacatcgaggaaaagggcaagcacgccttcacctacaaggatgagagcatcaagttccctctgaagggcacactcggcggagccagagtgcagttcgacagagatcacctgagaagataccctcacaaggtggaaagcggcaacgtgggcagaatctacttcaacatgaccgtgaacatcgagcctacagagtccccagtgtccaagtctctgaagatccaccgggacgacttccccaaggtggtcaacttcaagcccaaagaactgaccgagtggatcaaggacagcaagggcaagaaactgaagtccggcatcgagtccctggaaatcggcctgagagtgatgagcatcgacctgggacagagacaggccgctgccgcctctattttcgaggtggtggatcagaagcccgacatcgaaggcaagctgtttttcccaatcaagggcaccgagctgtatgccgtgcacagagccagcttcaacatcaagctgcccggcgagacactggtcaagagcagagaagtgctgcggaaggccagagaggacaatctgaaactgatgaaccagaagctcaacttcctgcggaacgtgctgcacttccagcagttcgaggacatcaccgagagagagaagcgggtcaccaagtggatcagcagacaagagaacagcgacgtgcccctggtgtaccaggatgagctgatccagatccgcgagctgatgtacaagccttacaaggactgggtcgccttcctgaagcagctccacaagagactggaagtcgagatcggcaaagaagtgaagcactggcggaagtccctgagcgacggaagaaagggcctgtacggcatctccctgaagaacatcgacgagatcgatcggacccggaagttcctgctgagatggtccctgaggcctaccgaacctggcgaagtgcgtagactggaacccggccagagattcgccatcgaccagctgaatcacctgaacgccctgaaagaagatcggctgaagaagatggccaacaccatcatcatgcacgccctgggctactgctacgacgtgcggaagaagaaatggcaggctaagaaccccgcctgccagatcatcctgttcgaggatctgagcaactacaacccctacgaggaaaggtcccgcttcgagaacagcaagctcatgaagtggtccagacgcgagatccccagacaggttgcactgcagggcgagatctatggcctgcaagtgggagaagtgggcgctcagttcagcagcagattccacgccaagacaggcagccctggcatcagatgtagcgtcgtgaccaaagagaagctgcaggacaatcggttcttcaagaatctgcagagagagggcagactgaccctggacaaaatcgccgtgctgaaagagggcgatctgtacccagacaaaggcggcgagaagttcatcagcctgagcaaggatcggaagtgcgtgaccacacacgccgacatcaacgccgctcagaacctgcagaagcggttctggacaagaacccacggcttctacaaggtgtactgcaaggcctaccaggtggacggaggctctggaggaagctccgaagtcgagttttcccatgagtactggatgagacacgcattgactctcgcaaagagggctcgagatgaacgcgaggtgcccgtgggggcagtactcgtgctcaacaatcgcgtaatcggcgaaggttggaatagggcaatcggactccacgaccccactgcacatgcggaaatcatggcccttcgacagggagggcttgtgatgcagaattatcgactttatgatgcgacgctgtacgtcacgtttgaaccttgcgtaatgtgcgcgggagctatgattcactcccgcattggacgagttgtattcggtgttcgcaacgccaagacgggtgccgcaggttcactgatggacgtgctgcatcatccaggcatgaaccaccgggtagaaatcacagaaggcatattggcggacgaatgtgcggcgctgttgtgtcgtttttttcgcatgcccaggcgggtctttaacgcccagaaaaaagcacaatcctctactgacggctcttctggatctgaaacacctggcacaagcgagagcgccacccctgagagctctggcggccagaccgtgtacatccctgagagcaaggaccagaagcagaagatcatcgaagagttcggcgagggctacttcattctgaaggacggggtgtacgaatgggtcaacgccggcaagctgaaaatcaagaagggcagctccaagcagagcagcagcgagctggtggatagcgacatcctgaaagacagcttcgacctggcctccgagctgaaaggcgaaaagctgatgctgtacagggaccccagcggcaatgtgttccccagcgacaaatggatggccgctggcgtgttcttcggaaagctggaacgcatcctgatcagcaagctgaccaaccagtactccatcagcaccatcgaggacgacagcagcaagcagtctatgaaaaggccggcggccacgaaaaaggccggccaggcaaaaaagaaaaagggatcctacccatacgatgttccagattacgcttatccctacgacgtgcctgattatgcatacccatatgatgtccccgactatgcctaa

SEQ ID NO: 9 - protein, 1361 aa, synthetic construct
  REGION 1..1361: note = BhCas12b GGSGGS-ABE8-Xten20at D980 polypeptide sequence
MAPKKKRKVGIHGVPAAATRSFILKIEPNEEVKKGLWKTHEVLNHGIAYYMNILKLIRQEAIYEHHEQDPKNPKKVSKAEIQAELWDFVLKMQKCNSFTHEVDKDEVFNILRELYEELVPSSVEKKGEANQLSNKFLYPLVDPNSQSGKGTASSGRKPRWYNLKIAGDPSWEEEKKKWEEDKKKDPLAKILGKLAEYGLIPLFIPYTDSNEPIVKEIKWMEKSRNQSVRRLDKDMFIQALERFLSWESWNLKVKEEYEKVEKEYKTLEERIKEDIQALKALEQYEKERQEQLLRDTLNTNEYRLSKRGLRGWREIIQKWLKMDENEPSEKYLEVFKDYQRKHPREAGDYSVYEFLSKKENHFIWRNHPEYPYLYATFCEIDKKKKDAKQQATFTLADPINHPLWVRFEERSGSNLNKYRILTEQLHTEKLKKKLTVQLDRLIYPTESGGWEEKGKVDIVLLPSRQFYNQIFLDIEEKGKHAFTYKDESIKFPLKGTLGGARVQFDRDHLRRYPHKVESGNVGRIYFNMTVNIEPTESPVSKSLKIHRDDFPKVVNFKPKELTEWIKDSKGKKLKSGIESLEIGLRVMSIDLGQRQAAAASIFEVVDQKPDIEGKLFFPIKGTELYAVHRASFNIKLPGETLVKSREVLRKAREDNLKLMNQKLNFLRNVLHFQQFEDITEREKRVTKWISRQENSDVPLVYQDELIQIRELMYKPYKDWVAFLKQLHKRLEVEIGKEVKHWRKSLSDGRKGLYGISLKNIDEIDRTRKFLLRWSLRPTEPGEVRRLEPGQRFAIDQLNHLNALKEDRLKKMANTIIMHALGYCYDVRKKKWQAKNPACQIILFEDLSNYNPYEERSRFENSKLMKWSRREIPRQVALQGEIYGLQVGEVGAQFSSRFHAKTGSPGIRCSVVTKEKLQDNRFFKNLQREGRLTLDKIAVLKEGDLYPDKGGEKFISLSKDRKCVTTHADINAAQNLQKRFWTRTHGFYKVYCKAYQVDGGSGGSSEVEFSHEYWMRHALTLAKRARDEREVPVGAVLVLNNRVIGEGWNRAIGLHDPTAHAEIMALRQGGLVMQNYRLYDATLYVTFEPCVMCAGAMIHSRIGRVVFGVRNAKTGAAGSLMDVLHHPGMNHRVEITEGILADECAALLCRFFRMPRRVFNAQKKAQSSTDGSSGSETPGTSESATPESSGGQTVYIPESKDQKQKIIEEFGEGYFILKDGVYEWVNAGKLKIKKGSSKQSSSELVDSDILKDSFDLASELKGEKLMLYRDPSGNVFPSDKWMAAGVFFGKLERILISKLTNQYSISTIEDDSSKQSMKRPAATKKAGQAKKKKGSYPYDVPDYAYPYDVPDYAYPYDVPDYA

SEQ ID NO: 10 - DNA, 4092 bp, synthetic construct
  misc_feature 1..4092: note = BhCas12b GGSGGS-ABE8-Xten20at K1019 polynucleotide sequence
  misc_feature 1..6: note = Kozak sequence
  misc_feature 7..57: note = Sequence encoding N-terminal nuclear localization signal (NLS)
  misc_feature 58..3114: note = Sequence encoding BhCas12b
  misc_feature 3115..3132: note = Sequence encoding a linker
  misc_feature 3133..3630: note = Sequence encoding TadA*8
  misc_feature 3631..3690: note = Sequence encoding Xten20 linker
  misc_feature 3691..3954: note = Sequence encoding BhCas12b
  misc_feature 3955..4002: note = Sequence encoding C-terminal NLS
  misc_feature 4003..4008: note = Sequence encoding GS linker
  misc_feature 4009..4089: note = Sequence encoding 3x hemagglutinin (HA) tag
  source 1..4092: mol_type = other DNA
gccaccatggccccaaagaagaagcggaaggtcggtatccacggagtcccagcagccgccaccagatccttcatcctgaagatcgagcccaacgaggaagtgaagaaaggcctctggaaaacccacgaggtgctgaaccacggaatcgcctactacatgaatatcctgaagctgatccggcaagaggccatctacgagcaccacgagcaggaccccaagaatcccaagaaggtgtccaaggccgagatccaggccgagctgtgggatttcgtgctgaagatgcagaagtgcaacagcttcacacacgaggtggacaaggacgaggtgttcaacatcctgagagagctgtacgaggaactggtgcccagcagcgtggaaaagaagggcgaagccaaccagctgagcaacaagtttctgtaccctctggtggaccccaacagccagtctggaaagggaacagccagcagcggcagaaagcccagatggtacaacctgaagattgccggcgatccctcctgggaagaagagaagaagaagtgggaagaagataagaaaaaggacccgctggccaagatcctgggcaagctggctgagtacggactgatccctctgttcatcccctacaccgacagcaacgagcccatcgtgaaagaaatcaagtggatggaaaagtcccggaaccagagcgtgcggcggctggataaggacatgttcattcaggccctggaacggttcctgagctgggagagctggaacctgaaagtgaaagaggaatacgagaaggtcgagaaagagtacaagaccctggaagagaggatcaaagaggacatccaggctctgaaggctctggaacagtatgagaaagagcggcaagaacagctgctgcgggacaccctgaacaccaacgagtaccggctgagcaagagaggccttagaggctggcgggaaatcatccagaaatggctgaaaatggacgagaacgagccctccgagaagtacctggaagtgttcaaggactaccagcggaagcaccctagagaggccggcgattacagcgtgtacgagttcctgtccaagaaagagaaccacttcatctggcggaatcaccctgagtacccctacctgtacgccaccttctgcgagatcgacaagaaaaagaaggacgccaagcagcaggccaccttcacactggccgatcctatcaatcaccctctgtgggtccgattcgaggaaagaagcggcagcaacctgaacaagtacagaatcctgaccgagcagctgcacaccgagaagctgaagaaaaagctgacagtgcagctggaccggctgatctaccctacagaatctggcggctgggaagagaagggcaaagtggacattgtgctgctgcccagccggcagttctacaaccagatcttcctggacatcgaggaaaagggcaagcacgccttcacctacaaggatgagagcatcaagttccctctgaagggcacactcggcggagccagagtgcagttcgacagagatcacctgagaagataccctcacaaggtggaaagcggcaacgtgggcagaatctacttcaacatgaccgtgaacatcgagcctacagagtccccagtgtccaagtctctgaagatccaccgggacgacttccccaaggtggtcaacttcaagcccaaagaactgaccgagtggatcaaggacagcaagggcaagaaactgaagtccggcatcgagtccctggaaatcggcctgagagtgatgagcatcgacctgggacagagacaggccgctgccgcctctattttcgaggtggtggatcagaagcccgacatcgaaggcaagctgtttttcccaatcaagggcaccgagctgtatgccgtgcacagagccagcttcaacatcaagctgcccggcgagacactggtcaagagcagagaagtgctgcggaaggccagagaggacaatctgaaactgatgaaccagaagctcaacttcctgcggaacgtgctgcacttccagcagttcgaggacatcaccgagagagagaagcgggtcaccaagtggatcagcagacaagagaacagcgacgtgcccctggtgtaccaggatgagctgatccagatccgcgagctgatgtacaagccttacaaggactgggtcgccttcctgaagcagctccacaagagactggaagtcgagatcggcaaagaagtgaagcactggcggaagtccctgagcgacggaagaaagggcctgtacggcatctccctgaagaacatcgacgagatcgatcggacccggaagttcctgctgagatggtccctgaggcctaccgaacctggcgaagtgcgtagactggaacccggccagagattcgccatcgaccagctgaatcacctgaacgccctgaaagaagatcggctgaagaagatggccaacaccatcatcatgcacgccctgggctactgctacgacgtgcggaagaagaaatggcaggctaagaaccccgcctgccagatcatcctgttcgaggatctgagcaactacaacccctacgaggaaaggtcccgcttcgagaacagcaagctcatgaagtggtccagacgcgagatccccagacaggttgcactgcagggcgagatctatggcctgcaagtgggagaagtgggcgctcagttcagcagcagattccacgccaagacaggcagccctggcatcagatgtagcgtcgtgaccaaagagaagctgcaggacaatcggttcttcaagaatctgcagagagagggcagactgaccctggacaaaatcgccgtgctgaaagagggcgatctgtacccagacaaaggcggcgagaagttcatcagcctgagcaaggatcggaagtgcgtgaccacacacgccgacatcaacgccgctcagaacctgcagaagcggttctggacaagaacccacggcttctacaaggtgtactgcaaggcctaccaggtggacggccagaccgtgtacatccctgagagcaaggaccagaagcagaagatcatcgaagagttcggcgagggctacttcattctgaaggacggggtgtacgaatgggtcaacgccggcaagggaggctctggaggaagctccgaagtcgagttttcccatgagtactggatgagacacgcattgactctcgcaaagagggctcgagatgaacgcgaggtgcccgtgggggcagtactcgtgctcaacaatcgcgtaatcggcgaaggttggaatagggcaatcggactccacgaccccactgcacatgcggaaatcatggcccttcgacagggagggcttgtgatgcagaattatcgactttatgatgcgacgctgtacgtcacgtttgaaccttgcgtaatgtgcgcgggagctatgattcactcccgcattggacgagttgtattcggtgttcgcaacgccaagacgggtgccgcaggttcactgatggacgtgctgcatcatccaggcatgaaccaccgggtagaaatcacagaaggcatattggcggacgaatgtgcggcgctgttgtgtcgtttttttcgcatgcccaggcgggtctttaacgcccagaaaaaagcacaatcctctactgacggctcttctggatctgaaacacctggcacaagcgagagcgccacccctgagagctctggcctgaaaatcaagaagggcagctccaagcagagcagcagcgagctggtggatagcgacatcctgaaagacagcttcgacctggcctccgagctgaaaggcgaaaagctgatgctgtacagggaccccagcggcaatgtgttccccagcgacaaatggatggccgctggcgtgttcttcggaaagctggaacgcatcctgatcagcaagctgaccaaccagtactccatcagcaccatcgaggacgacagcagcaagcagtctatgaaaaggccggcggccacgaaaaaggccggccaggcaaaaaagaaaaagggatcctacccatacgatgttccagattacgcttatccctacgacgtgcctgattatgcatacccatatgatgtccccgactatgcctaa

SEQ ID NO: 11 - protein, 1361 aa, synthetic construct
  REGION 1..1361: note = BhCas12b GGSGGS-ABE8-Xten20at K1019 polypeptide sequence
MAPKKKRKVGIHGVPAAATRSFILKIEPNEEVKKGLWKTHEVLNHGIAYYMNILKLIRQEAIYEHHEQDPKNPKKVSKAEIQAELWDFVLKMQKCNSFTHEVDKDEVFNILRELYEELVPSSVEKKGEANQLSNKFLYPLVDPNSQSGKGTASSGRKPRWYNLKIAGDPSWEEEKKKWEEDKKKDPLAKILGKLAEYGLIPLFIPYTDSNEPIVKEIKWMEKSRNQSVRRLDKDMFIQALERFLSWESWNLKVKEEYEKVEKEYKTLEERIKEDIQALKALEQYEKERQEQLLRDTLNTNEYRLSKRGLRGWREIIQKWLKMDENEPSEKYLEVFKDYQRKHPREAGDYSVYEFLSKKENHFIWRNHPEYPYLYATFCEIDKKKKDAKQQATFTLADPINHPLWVRFEERSGSNLNKYRILTEQLHTEKLKKKLTVQLDRLIYPTESGGWEEKGKVDIVLLPSRQFYNQIFLDIEEKGKHAFTYKDESIKFPLKGTLGGARVQFDRDHLRRYPHKVESGNVGRIYFNMTVNIEPTESPVSKSLKIHRDDFPKVVNFKPKELTEWIKDSKGKKLKSGIESLEIGLRVMSIDLGQRQAAAASIFEVVDQKPDIEGKLFFPIKGTELYAVHRASFNIKLPGETLVKSREVLRKAREDNLKLMNQKLNFLRNVLHFQQFEDITEREKRVTKWISRQENSDVPLVYQDELIQIRELMYKPYKDWVAFLKQLHKRLEVEIGKEVKHWRKSLSDGRKGLYGISLKNIDEIDRTRKFLLRWSLRPTEPGEVRRLEPGQRFAIDQLNHLNALKEDRLKKMANTIIMHALGYCYDVRKKKWQAKNPACQIILFEDLSNYNPYEERSRFENSKLMKWSRREIPRQVALQGEIYGLQVGEVGAQFSSRFHAKTGSPGIRCSVVTKEKLQDNRFFKNLQREGRLTLDKIAVLKEGDLYPDKGGEKFISLSKDRKCVTTHADINAAQNLQKRFWTRTHGFYKVYCKAYQVDGQTVYIPESKDQKQKIIEEFGEGYFILKDGVYEWVNAGKGGSGGSSEVEFSHEYWMRHALTLAKRARDEREVPVGAVLVLNNRVIGEGWNRAIGLHDPTAHAEIMALRQGGLVMQNYRLYDATLYVTFEPCVMCAGAMIHSRIGRVVFGVRNAKTGAAGSLMDVLHHPGMNHRVEITEGILADECAALLCRFFRMPRRVFNAQKKAQSSTDGSSGSETPGTSESATPESSGLKIKKGSSKQSSSELVDSDILKDSFDLASELKGEKLMLYRDPSGNVFPSDKWMAAGVFFGKLERILISKLTNQYSISTIEDDSSKQSMKRPAATKKAGQAKKKKGSYPYDVPDYAYPYDVPDYAYPYDVPDYA

SEQ ID NO: 12 - protein, 208 aa, Petromyzon marinus
  REGION 1..208: note = MISC_FEATURE - tr|A5H718|A5H718_PETMA Cytosine deaminase OS=Petromyzon marinusOX=7757 PE=2 SV=1 amino acid sequence; PmCDA1 polypeptide sequence
MTDAEYVRIHEKLDIYTFKKQFFNNKKSVSHRCYVLFELKRRGERRACFWGYAVNKPQSGTERGIHAEIFSIRKVEEYLRDNPGQFTINWYSSWSPCADCAEKILEWYNQELRGNGHTLKIWACKLYYEKNARNQIGLWNLRDNGVGLNVMVSEHYQCCRKIFIQSSHNQLNENRWLEKTLKRAEKRRSELSIMIQVKILHTTKSPAV

SEQ ID NO: 13 - DNA, 766 bp, Petromyzon marinus
  misc_feature 1..766: note = EF094822.1 Petromyzon marinus isolate PmCDA.21 cytosine deaminase mRNA, complete cds; PmCDA1 polynucleotide sequence
  source 1..766: mol_type = genomic DNA
tgacacgacacagccgtgtatatgaggaagggtagctggatggggggggggggaatacgttcagagaggacattagcgagcgtcttgttggtggccttgagtctagacacctgcagacatgaccgacgctgagtacgtgagaatccatgagaagttggacatctacacgtttaagaaacagtttttcaacaacaaaaaatccgtgtcgcatagatgctacgttctctttgaattaaaacgacggggtgaacgtagagcgtgtttttggggctatgctgtgaataaaccacagagcgggacagaacgtggaattcacgccgaaatctttagcattagaaaagtcgaagaatacctgcgcgacaaccccggacaattcacgataaattggtactcatcctggagtccttgtgcagattgcgctgaaaagatcttagaatggtataaccaggagctgcgggggaacggccacactttgaaaatctgggcttgcaaactctattacgagaaaaatgcgaggaatcaaattgggctgtggaacctcagagataacggggttgggttgaatgtaatggtaagtgaacactaccaatgttgcaggaaaatattcatccaatcgtcgcacaatcaattgaatgagaatagatggcttgagaagactttgaagcgagctgaaaaacgacggagcgagttgtccattatgattcaggtaaaaatactccacaccactaagagtcctgctgtttaagaggctatgcggatggttttc

SEQ ID NO: 14 - protein, 145 aa, Homo sapiens
  REGION 1..145: note = MISC_FEATURE - tr|Q6QJ80|Q6QJ80_HUMAN Activation-induced cytidine deaminase OS=Homo sapiens; OX = 9606 GN=AICDA PE=2 SV=1; AID polypeptide sequence
MDSLLMNRRKFLYQFKNVRWAKGRRETYLCYVVKRRDSATSFSLDFGYLRNKNGCHVELLFLRYISDWDLDPGRCYRVTWFTSWSPCYDCARHVADFLRGNPNLSLRIFTARLYFCEDRKAEPEGLRRLHRAGVQIAIMTFKAPV

SEQ ID NO: 15 - DNA, 10681 bp, Homo sapiens
  misc_feature 1..10681: note = NG_011588.1:5001-15681 Homo sapiens activation induced cytidine deaminase (AICDA), RefSeqGene (LRG_17) on chromosome 12; nucleic acid sequence of the CDS of human AID; polynucleotide sequence
  source 1..10681: mol_type = genomic DNA
agagaaccatcattaattgaagtgagatttttctggcctgagacttgcagggaggcaagaagacactctggacaccactatggacaggtaaagaggcagtcttctcgtgggtgattgcactggccttcctctcagagcaaatctgagtaatgagactggtagctatccctttctctcatgtaactgtctgactgataagatcagcttgatcaatatgcatatatattttttgatctgtctccttttcttctattcagatcttatacgctgtcagcccaattctttctgtttcagacttctcttgatttccctctttttcatgtggcaaaagaagtagtgcgtacaatgtactgattcgtcctgagatttgtaccatggttgaaactaatttatggtaataatattaacatagcaaatctttagagactcaaatcatgaaaaggtaatagcagtactgtactaaaaacggtagtgctaattttcgtaataattttgtaaatattcaacagtaaaacaacttgaagacacactttcctagggaggcgttactgaaataatttagctatagtaagaaaatttgtaattttagaaatgccaagcattctaaattaattgcttgaaagtcactatgattgtgtccattataaggagacaaattcattcaagcaagttatttaatgttaaaggcccaattgttaggcagttaatggcacttttactattaactaatctttccatttgttcagacgtagcttaacttacctcttaggtgtgaatttggttaaggtcctcataatgtctttatgtgcagtttttgataggttattgtcatagaacttattctattcctacatttatgattactatggatgtatgagaataacacctaatccttatactttacctcaatttaactcctttataaagaacttacattacagaataaagattttttaaaaatatatttttttgtagagacagggtcttagcccagccgaggctggtctctaagtcctggcccaagcgatcctcctgcctgggcctcctaaagtgctggaattatagacatgagccatcacatccaatatacagaataaagatttttaatggaggatttaatgttcttcagaaaattttcttgaggtcagacaatgtcaaatgtctcctcagtttacactgagattttgaaaacaagtctgagctataggtccttgtgaagggtccattggaaatacttgttcaaagtaaaatggaaagcaaaggtaaaatcagcagttgaaattcagagaaagacagaaaaggagaaaagatgaaattcaacaggacagaagggaaatatattatcattaaggaggacagtatctgtagagctcattagtgatggcaaaatgacttggtcaggattatttttaacccgcttgtttctggtttgcacggctggggatgcagctagggttctgcctcagggagcacagctgtccagagcagctgtcagcctgcaagcctgaaacactccctcggtaaagtccttcctactcaggacagaaatgacgagaacagggagctggaaacaggcccctaaccagagaagggaagtaatggatcaacaaagttaactagcaggtcaggatcacgcaattcatttcactctgactggtaacatgtgacagaaacagtgtaggcttattgtattttcatgtagagtaggacccaaaaatccacccaaagtcctttatctatgccacatccttcttatctatacttccaggacactttttcttccttatgataaggctctctctctctccacacacacacacacacacacacacacacacacacacacacacacaaacacacaccccgccaaccaaggtgcatgtaaaaagatgtagattcctctgcctttctcatctacacagcccaggagggtaagttaatataagagggatttattggtaagagatgatgcttaatctgtttaacactgggcctcaaagagagaatttcttttcttctgtacttattaagcacctattatgtgttgagcttatatatacaaagggttattatatgctaatatagtaatagtaatggtggttggtactatggtaattaccataaaaattattatccttttaaaataaagctaattattattggatcttttttagtattcattttatgttttttatgtttttgattttttaaaagacaatctcaccctgttacccaggctggagtgcagtggtgcaatcatagctttctgcagtcttgaactcctgggctcaagcaatcctcctgccttggcctcccaaagtgttgggatacagtcatgagccactgcatctggcctaggatccatttagattaaaatatgcattttaaattttaaaataatatggctaatttttaccttatgtaatgtgtatactggcaataaatctagtttgctgcctaaagtttaaagtgctttccagtaagcttcatgtacgtgaggggagacatttaaagtgaaacagacagccaggtgtggtggctcacgcctgtaatcccagcactctgggaggctgaggtgggtggatcgcttgagccctggagttcaagaccagcctgagcaacatggcaaaacgctgtttctataacaaaaattagccgggcatggtggcatgtgcctgtggtcccagctactagggggctgaggcaggagaatcgttggagcccaggaggtcaaggctgcactgagcagtgcttgcgccactgcactccagcctgggtgacaggaccagaccttgcctcaaaaaaataagaagaaaaattaaaaataaatggaaacaactacaaagagctgttgtcctagatgagctacttagttaggctgatattttggtatttaacttttaaagtcagggtctgtcacctgcactacattattaaaatatcaattctcaatgtatatccacacaaagactggtacgtgaatgttcatagtacctttattcacaaaaccccaaagtagagactatccaaatatccatcaacaagtgaacaaataaacaaaatgtgctatatccatgcaatggaataccaccctgcagtacaaagaagctacttggggatgaatcccaaagtcatgacgctaaatgaaagagtcagacatgaaggaggagataatgtatgccatacgaaattctagaaaatgaaagtaacttatagttacagaaagcaaatcagggcaggcatagaggctcacacctgtaatcccagcactttgagaggccacgtgggaagattgctagaactcaggagttcaagaccagcctgggcaacacagtgaaactccattctccacaaaaatgggaaaaaaagaaagcaaatcagtggttgtcctgtggggaggggaaggactgcaaagagggaagaagctctggtggggtgagggtggtgattcaggttctgtatcctgactgtggtagcagtttggggtgtttacatccaaaaatattcgtagaattatgcatcttaaatgggtggagtttactgtatgtaaattatacctcaatgtaagaaaaaataatgtgtaagaaaactttcaattctcttgccagcaaacgttattcaaattcctgagccctttacttcgcaaattctctgcacttctgccccgtaccattaggtgacagcactagctccacaaattggataaatgcatttctggaaaagactagggacaaaatccaggcatcacttgtgctttcatatcaaccatgctgtacagcttgtgttgctgtctgcagctgcaatggggactcttgatttctttaaggaaacttgggttaccagagtatttccacaaatgctattcaaattagtgcttatgatatgcaagacactgtgctaggagccagaaaacaaagaggaggagaaatcagtcattatgtgggaacaacatagcaagatatttagatcattttgactagttaaaaaagcagcagagtacaaaatcacacatgcaatcagtataatccaaatcatgtaaatatgtgcctgtagaaagactagaggaataaacacaagaatcttaacagtcattgtcattagacactaagtctaattattattattagacactatgatatttgagatttaaaaaatctttaatattttaaaatttagagctcttctatttttccatagtattcaagtttgacaatgatcaagtattactctttctttttttttttttttttttttttttgagatggagttttggtcttgttgcccatgctggagtggaatggcatgaccatagctcactgcaacctccacctcctgggttcaagcaaagctgtcgcctcagcctcccgggtagatgggattacaggcgcccaccaccacactcggctaatgtttgtatttttagtagagatggggtttcaccatgttggccaggctggtctcaaactcctgacctcagaggatccacctgcctcagcctcccaaagtgctgggattacagatgtaggccactgcgcccggccaagtattgctcttatacattaaaaaacaggtgtgagccactgcgcccagccaggtattgctcttatacattaaaaaataggccggtgcagtggctcacgcctgtaatcccagcactttgggaagccaaggcgggcagaacacccgaggtcaggagtccaaggccagcctggccaagatggtgaaaccccgtctctattaaaaatacaaacattacctgggcatgatggtgggcgcctgtaatcccagctactcaggaggctgaggcaggaggatccgcggagcctggcagatctgcctgagcctgggaggttgaggctacagtaagccaagatcatgccagtatacttcagcctgggcgacaaagtgagaccgtaacaaaaaaaaaaaaatttaaaaaaagaaatttagatcaagatccaactgtaaaaagtggcctaaacaccacattaaagagtttggagtttattctgcaggcagaagagaaccatcagggggtcttcagcatgggaatggcatggtgcacctggtttttgtgagatcatggtggtgacagtgtggggaatgttattttggagggactggaggcagacagaccggttaaaaggccagcacaacagataaggaggaagaagatgagggcttggaccgaagcagagaagagcaaacagggaaggtacaaattcaagaaatattggggggtttgaatcaacacatttagatgattaattaaatatgaggactgaggaataagaaatgagtcaaggatggttccaggctgctaggctgcttacctgaggtggcaaagtcgggaggagtggcagtttaggacagggggcagttgaggaatattgttttgatcattttgagtttgaggtacaagttggacacttaggtaaagactggaggggaaatctgaatatacaattatgggactgaggaacaagtttattttattttttgtttcgttttcttgttgaagaacaaatttaattgtaatcccaagtcatcagcatctagaagacagtggcaggaggtgactgtcttgtgggtaagggtttggggtccttgatgagtatctctcaattggccttaaatataagcaggaaaaggagtttatgatggattccaggctcagcagggctcaggagggctcaggcagccagcagaggaagtcagagcatcttctttggtttagcccaagtaatgacttccttaaaaagctgaaggaaaatccagagtgaccagattataaactgtactcttgcattttctctccctcctctcacccacagcctcttgatgaaccggaggaagtttctttaccaattcaaaaatgtccgctgggctaagggtcggcgtgagacctacctgtgctacgtagtgaagaggcgtgacagtgctacatccttttcactggactttggttatcttcgcaataaggtatcaattaaagtcggctttgcaagcagtttaatggtcaactgtgagtgcttttagagccacctgctgatggtattacttccatccttttttggcatttgtgtctctatcacattcctcaaatccttttttttatttctttttccatgtccatgcacccatattagacatggcccaaaatatgtgatttaattcctccccagtaatgctgggcaccctaataccactccttccttcagtgccaagaacaactgctcccaaactgtttaccagctttcctcagcatctgaattgcctttgagattaattaagctaaaagcatttttatatgggagaatattatcagcttgtccaagcaaaaattttaaatgtgaaaaacaaattgtgtcttaagcatttttgaaaattaaggaagaagaatttgggaaaaaattaacggtggctcaattctgtcttccaaatgatttcttttccctcctactcacatgggtcgtaggccagtgaatacattcaacatggtgatccccagaaaactcagagaagcctcggctgatgattaattaaattgatctttcggctacccgagagaattacatttccaagagacttcttcaccaaaatccagatgggtttacataaacttctgcccacgggtatctcctctctcctaacacgctgtgacgtctgggcttggtggaatctcagggaagcatccgtggggtggaaggtcatcgtctggctcgttgtttgatggttatattaccatgcaattttctttgcctacatttgtattgaatacatcccaatctccttcctattcggtgacatgacacattctatttcagaaggctttgattttatcaagcactttcatttacttctcatggcagtgcctattacttctcttacaatacccatctgtctgctttaccaaaatctatttccccttttcagatcctcccaaatggtcctcataaactgtcctgcctccacctagtggtccaggtatatttccacaatgttacatcaacaggcacttctagccattttccttctcaaaaggtgcaaaaagcaacttcataaacacaaattaaatcttcggtgaggtagtgtgatgctgcttcctcccaactcagcgcacttcgtcttcctcattccacaaaaacccatagccttccttcactctgcaggactagtgctgccaagggttcagctctacctactggtgtgctcttttgagcaagttgcttagcctctctgtaacacaaggacaatagctgcaagcatccccaaagatcattgcaggagacaatgactaaggctaccagagccgcaataaaagtcagtgaattttagcgtggtcctctctgtctctccagaacggctgccacgtggaattgctcttcctccgctacatctcggactgggacctagaccctggccgctgctaccgcgtcacctggttcacctcctggagcccctgctacgactgtgcccgacatgtggccgactttctgcgagggaaccccaacctcagtctgaggatcttcaccgcgcgcctctacttctgtgaggaccgcaaggctgagcccgaggggctgcggcggctgcaccgcgccggggtgcaaatagccatcatgaccttcaaaggtgcgaaagggccttccgcgcaggcgcagtgcagcagcccgcattcgggattgcgatgcggaatgaatgagttagtggggaagctcgaggggaagaagtgggcggggattctggttcacctctggagccgaaattaaagattagaagcagagaaaagagtgaatggctcagagacaaggccccgaggaaatgagaaaatggggccagggttgcttctttcccctcgatttggaacctgaactgtcttctacccccatatccccgcctttttttcctttttttttttttgaagattatttttactgctggaatacttttgtagaaaaccacgaaagaactttcaaagcctgggaagggctgcatgaaaattcagttcgtctctccagacagcttcggcgcatccttttggtaaggggcttcctcgctttttaaattttctttctttctctacagtcttttttggagtttcgtatatttcttatattttcttattgttcaatcactctcagttttcatctgatgaaaactttatttctcctccacatcagctttttcttctgctgtttcaccattcagagccctctgctaaggttccttttccctcccttttctttcttttgttgtttcacatctttaaatttctgtctctccccagggttgcgtttccttcctggtcagaattcttttctcctttttttttttttttttttttttttttaaacaaacaaacaaaaaacccaaaaaaactctttcccaatttactttcttccaacatgttacaaagccatccactcagtttagaagactctccggccccaccgacccccaacctcgttttgaagccattcactcaatttgcttctctctttctctacagcccctgtatgaggttgatgacttacgagacgcatttcgtactttgggactttgatagcaacttccaggaatgtcacacacgatgaaatatctctgctgaagacagtggataaaaaacagtccttcaagtcttctctgtttttattcttcaactctcactttcttagagtttacagaaaaaatatttatatacgactctttaaaaagatctatgtcttgaaaatagagaaggaacacaggtctggccagggacgtgctgcaattggtgcagttttgaatgcaacattgtcccctactgggaataacagaactgcaggacctgggagcatcctaaagtgtcaacgtttttctatgacttttaggtaggatgagagcagaaggtagatcctaaaaagcatggtgagaggatcaaatgtttttatatcaacatcctttattatttgattcatttgagttaacagtggtgttagtgatagatttttctattcttttcccttgacgtttactttcaagtaacacaaactcttccatcaggccatgatctataggacctcctaatgagagtatctgggtgattgtgaccccaaaccatctctccaaagcattaatatccaatcatgcgctgtatgttttaatcagcagaagcatgtttttatgtttgtacaaaagaagattgttatgggtggggatggaggtatagaccatgcatggtcaccttcaagctactttaataaaggatcttaaaatgggcaggaggactgtgaacaagacaccctaataatgggttgatgtctgaagtagcaaatcttctggaaacgcaaactcttttaaggaagtccctaatttagaaacacccacaaacttcacatatcataattagcaaacaattggaaggaagttgcttgaatgttggggagaggaaaatctattggctctcgtgggtctcttcatctcagaaatgccaatcaggtcaaggtttgctacattttgtatgtgtgtgatgcttctcccaaaggtatattaactatataagagagttgtgacaaaacagaatgataaagctgcgaaccgtggcacacgctcatagttctagctgcttgggaggttgaggagggaggatggcttgaacacaggtgttcaaggccagcctgggcaacataacaagatcctgtctctcaaaaaaaaaaaaaaaaaaaagaaagagagagggccgggcgtggtggctcacgcctgtaatcccagcactttgggaggccgagccgggcggatcacctgtggtcaggagtttgagaccagcctggccaacatggcaaaaccccgtctgtactcaaaatgcaaaaattagccaggcgtggtagcaggcacctgtaatcccagctacttgggaggctgaggcaggagaatcgcttgaacccaggaggtggaggttgcagtaagctgagatcgtgccgttgcactccagcctgggcgacaagagcaagactctgtctcagaaaaaaaaaaaaaaaagagagagagagagaaagagaacaatatttgggagagaaggatggggaagcattgcaaggaaattgtgctttatccaacaaaatgtaaggagccaataagggatccctatttgtctcttttggtgtctatttgtccctaacaactgtctttgacagtgagaaaaatattcagaataaccatatccctgtgccgttattacctagcaacccttgcaatgaagatgagcagatccacaggaaaacttgaatgcacaactgtcttattttaatcttattgtacataagtttgtaaaagagttaaaaattgttacttcatgtattcatttatattttatattattttgcgtctaatgattttttattaacatgatttccttttctgatatattgaaatggagtctcaaagcttcataaatttataactttagaaatgattctaataacaacgtatgtaattgtaacattgcagtaatggtgctacgaagccatttctcttgatttttagtaaacttttatgacagcaaatttgcttctggctcactttcaatcagttaaataaatgataaataattttggaagctgtgaagataaaataccaaataaaataatataaaagtgatttatatgaagttaaaataaaaaatcagtatgatggaataaacttg

SEQ ID NO: 16 - protein, 198 aa, Homo sapiens [sequence omitted]

SEQ ID NO: 17 - protein, 198 aa, Canis lupus
  REGION 1..198: note = MISC_FEATURE - Canine AID (clAID) polypeptide sequence
  REGION 1..30: note = MISC_FEATURE - Nuclear localization sequence
  REGION 183..198: note = MISC_FEATURE - Nuclear export signal
MDSLLMKQRKFLYHFKNVRWAKGRHETYLCYVVKRRDSATSFSLDFGHLRNKSGCHVELLFLRYISDWDLDPGRCYRVTWFTSWSPCYDCARHVADFLRGYPNLSLRIFAARLYFCEDRKAEPEGLRRLHRAGVQIAIMTFKDYFYCWNTFVENREKTFKAWEGLHENSVRLSRQLRRILLPLYEVDDLRDAFRTLGL

SEQ ID NO: 18 - protein, 199 aa, Bos taurus
  REGION 1..199: note = MISC_FEATURE - Bovine AID (btAID) polypeptide sequence
  REGION 1..30: note = MISC_FEATURE - Nuclear localization sequence
  REGION 183..199: note = MISC_FEATURE - Nuclear export signal
MDSLLKKQRQFLYQFKNVRWAKGRHETYLCYVVKRRDSPTSFSLDFGHLRNKAGCHVELLFLRYISDWDLDPGRCYRVTWFTSWSPCYDCARHVADFLRGYPNLSLRIFTARLYFCDKERKAEPEGLRRLHRAGVQIAIMTFKDYFYCWNTFVENHERTFKAWEGLHENSVRLSRQLRRILLPLYEVDDLRDAFRTLGL

SEQ ID NO: 19 - protein, 239 aa, Rattus sp.
  REGION 1..239: note = MISC_FEATURE - Rat AID polypeptide sequence
  REGION 1..26: note = MISC_FEATURE - Nuclear localization sequence
  REGION 194..239: note = MISC_FEATURE - Nuclear export signal
MAVGSKPKAALVGPHWERERIWCFLCSTGLGTQQTGQTSRWLRPAATQDPVSPPRSLLMKQRKFLYHFKNVRWAKGRHETYLCYVVKRRDSATSFSLDFGYLRNKSGCHVELLFLRYISDWDLDPGRCYRVTWFTSWSPCYDCARHVADFLRGNPNLSLRIFTARLTGWGALPAGLMSPARPSDYFYCWNTFVENHERTFKAWEGLHENSVRLSRRLRRILLPLYEVDDLRDAFRTLGL

SEQ ID NO: 20 - protein, 198 aa, Mus musculus [sequence omitted]

SEQ ID NO: 21 - protein, 229 aa, Rattus norvegicus [sequence omitted]

SEQ ID NO: 22 - protein, 229 aa, Mesocricetus auratus
  REGION 1..229: note = MISC_FEATURE - maAPOBEC-1 polypeptide sequence
MSSETGPVVVDPTLRRRIEPHEFDAFFDQGELRKETCLLYEIRWGGRHNIWRHTGQNTSRHVEINFIEKFTSERYFYPSTRCSIVWFLSWSPCGECSKAITEFLSGHPNVTLFIYAARLYHHTDQRNRQGLRDLISRGVTIRIMTEQEYCYCWRNFVNYPPSNEVYWPRYPNLWMRLYALELYCIHLGLPPCLKIKRRHQYPLTFFRLNLQSCHYQRIPPHILWATGFI

SEQ ID NO: 23 - protein, 236 aa, Pongo pygmaeus
  REGION 1..236: note = MISC_FEATURE - ppAPOBEC-1 polypeptide sequence
MTSEKGPSTGDPTLRRRIESWEFDVFYDPRELRKETCLLYEIKWGMSRKIWRSSGKNTTNHVEVNFIKKFTSERRFHSSISCSITWFLSWSPCWECSQAIREFLSQHPGVTLVIYVARLFWHMDQRNRQGLRDLVNSGVTIQIMRASEYYHCWRNFVNYPPGDEAHWPQYPPLWMMLYALELHCIILSLPPCLKISRRWQNHLAFFRLHLQNCHYQTIPPHILLATGLIHPSVTWR

SEQ ID NO: 24 - protein, 236 aa, Oryctolagus cuniculus
  REGION 1..236: note = MISC_FEATURE - ocAPOBEC1 polypeptide sequence
MASEKGPSNKDYTLRRRIEPWEFEVFFDPQELRKEACLLYEIKWGASSKTWRSSGKNTTNHVEVNFLEKLTSEGRLGPSTCCSITWFLSWSPCWECSMAIREFLSQHPGVTLIIFVARLFQHMDRRNRQGLKDLVTSGVTVRVMSVSEYCYCWENFVNYPPGKAAQWPRYPPRWMLMYALELYCIILGLPPCLKISRRHQKQLTFFSLTPQYCHYKMIPPYILLATGLLQPSVPWR

SEQ ID NO: 25 - protein, 235 aa, Monodelphis domestica
  REGION 1..235: note = MISC_FEATURE - mdAPOBEC-1 polypeptide sequence
MNSKTGPSVGDATLRRRIKPWEFVAFFNPQELRKETCLLYEIKWGNQNIWRHSNQNTSQHAEINFMEKFTAERHFNSSVRCSITWFLSWSPCWECSKAIRKFLDHYPNVTLAIFISRLYWHMDQQHRQGLKELVHSGVTIQIMSYSEYHYCWRNFVDYPQGEEDYWPKYPYLWIMLYVLELHCIILGLPPCLKISGSHSNQLALFSLDLQDCHYQKIPYNVLVATGLVQPFVTWR

SEQ ID NO: 26 - protein, 224 aa, Pongo pygmaeus
  REGION 1..224: note = MISC_FEATURE - ppAPOBEC-2 polypeptide sequence
MAQKEEAAAATEAASQNGEDLENLDDPEKLKELIELPPFEIVTGERLPANFFKFQFRNVEYSSGRNKTFLCYVVEAQGKGGQVQASRGYLEDEHAAAHAEEAFFNTILPAFDPALRYNVTWYVSSSPCAACADRIIKTLSKTKNLRLLILVGRLFMWEELEIQDALKKLKEAGCKLRIMKPQDFEYVWQNFVEQEEGESKAFQPWEDIQENFLYYEEKLADILK

SEQ ID NO: 27 - protein, 224 aa, Bos taurus
  REGION 1..224: note = MISC_FEATURE - btAPOBEC-2 polypeptide sequence
MAQKEEAAAAAEPASQNGEEVENLEDPEKLKELIELPPFEIVTGERLPAHYFKFQFRNVEYSSGRNKTFLCYVVEAQSKGGQVQASRGYLEDEHATNHAEEAFFNSIMPTFDPALRYMVTWYVSSSPCAACADRIVKTLNKTKNLRLLILVGRLFMWEEPEIQAALRKLKEAGCRLRIMKPQDFEYIWQNFVEQEEGESKAFEPWEDIQENFLYYEEKLADILK

SEQ ID NO: 28 - protein, 440 aa, Mus musculus
  REGION 1..440: note = MISC_FEATURE - mAPOBEC-3-(1) polypeptide sequence
MQPQRLGPRAGMGPFCLGCSHRKCYSPIRNLISQETFKFHFKNLGYAKGRKDTFLCYEVTRKDCDSPVSLHHGVFKNKDNIHAEICFLYWFHDKVLKVLSPREEFKITWYMSWSPCFECAEQIVRFLATHHNLSLDIFSSRLYNVQDPETQQNLCRLVQEGAQVAAMDLYEFKKCWKKFVDNGGRRFRPWKRLLTNFRYQDSKLQEILRPCYISVPSSSSSTLSNICLTKGLPETRFWVEGRRMDPLSEEEFYSQFYNQRVKHLCYYHRMKPYLCYQLEQFNGQAPLKGCLLSEKGKQHAEILFLDKIRSMELSQVTITCYLTWSPCPNCAWQLAAFKRDRPDLILHIYTSRLYFHWKRPFQKGLCSLWQSGILVDVMDLPQFTDCWTNFVNPKRPFWPWKGLEIISRRTQRRLRRIKESWGLQDLVNDFGNLQLGPPMS

SEQ ID NO: 29 - protein, 429 aa, Mus musculus
  REGION 1..429: note = MISC_FEATURE - APOBEC-3-(2) (Mouse APOBEC-3) polypeptide sequence
  REGION 71..108: note = MISC_FEATURE - Nucleic acid editing domain
  REGION 288..319: note = MISC_FEATURE - Nucleic acid editing domain
MGPFCLGCSHRKCYSPIRNLISQETFKFHFKNLGYAKGRKDTFLCYEVTRKDCDSPVSLHHGVFKNKDNIHAEICFLYWFHDKVLKVLSPREEFKITWYMSWSPCFECAEQIVRFLATHHNLSLDIFSSRLYNVQDPETQQNLCRLVQEGAQVAAMDLYEFKKCWKKFVDNGGRRFRPWKRLLTNFRYQDSKLQEILRPCYIPVPSSSSSTLSNICLTKGLPETRFCVEGRRMDPLSEEEFYSQFYNQRVKHLCYYHRMKPYLCYQLEQFNGQAPLKGCLLSEKGKQHAEILFLDKIRSMELSQVTITCYLTWSPCPNCAWQLAAFKRDRPDLILHIYTSRLYFHWKRPFQKGLCSLWQSGILVDVMDLPQFTDCWTNFVNPKRPFWPWKGLEIISRRTQRRLRRIKESWGLQDLVNDFGNLQLGPPMS

SEQ ID NO: 30 - protein, 430 aa, Rattus sp.
  REGION 1..430: note = MISC_FEATURE - APOBEC-3 polypeptide sequence
  REGION 72..109: note = MISC_FEATURE - Nucleic acid editing domain
  REGION 289..320: note = MISC_FEATURE - Nucleic acid editing domain
MGPFCLGCSHRKCYSPIRNLISQETFKFHFKNRLRYAIDRKDTFLCYEVTRKDCDSPVSLHHGVFKNKDNIHAEICFLYWFHDKVLKVLSPREEFKITWYMSWSPCFECAEQVLRFLATHHNLSLDIFSSRLYNIRDPENQQNLCRLVQEGAQVAAMDLYEFKKCWKKFVDNGGRRFRPWKKLLTNFRYQDSKLQEILRPCYIPVPSSSSSTLSNICLTKGLPETRFCVERRRVHLLSEEEFYSQFYNQRVKHLCYYHGVKPYLCYQLEQFNGQAPLKGCLLSEKGKQHAEILFLDKIRSMELSQVIITCYLTWSPCPNCAWQLAAFKRDRPDLILHIYTSRLYFHWKRPFQKGLCSLWQSGILVDVMDLPQFTDCWTNFVNPKRPFWPWKGLEIISRRTQRRLHRIKESWGLQDLVNDFGNLQLGPPMS

SEQ ID NO: 31 - protein, 199 aa, Homo sapiens
  REGION 1..199: note = MISC_FEATURE - hAPOBEC-3A polypeptide sequence
  REGION 70..106: note = MISC_FEATURE - Nucleic acid editing domain
MEASPASGPRHLMDPHIFTSNFNNGIGRHKTYLCYEVERLDNGTSVKMDQHRGFLHNQAKNLLCGFYGRHAELRFLDLVPSLQLDPAQIYRVTWFISWSPCFSWGCAGEVRAFLQENTHVRLRIFAARIYDYDPLYKEALQMLRDAGAQVSIMTYDEFKHCWDTFVDHQGCPFQPWDGLDEHSQALSGRLRAILQNQGN

SEQ ID NO: 32 - protein, 373 aa, Homo sapiens
  REGION 1..373: note = MISC_FEATURE - hAPOBEC-3F polypeptide sequence
  REGION 65..99: note = MISC_FEATURE - Nucleic acid editing domain
  REGION 248..283: note = MISC_FEATURE - Nucleic acid editing domain
MKPHFRNTVERMYRDTFSYNFYNRPILSRRNTVWLCYEVKTKGPSRPRLDAKIFRGQVYSQPEHHAEMCFLSWFCGNQLPAYKCFQITWFVSWTPCPDCVAKLAEFLAEHPNVTLTISAARLYYYWERDYRRALCRLSQAGARVKIMDDEEFAYCWENFVYSEGQPFMPWYKFDDNYAFLHRTLKEILRNPMEAMYPHIFYFHFKNLRKAYGRNESWLCFTMEVVKHHSPVSWKRGVFRNQVDPETHCHAERCFLSWFCDDILSPNTNYEVTWYTSWSPCPECAGEVAEFLARHSNVNLTIFTARLYYFWDTDYQEGLRSLSQEGASVEIMGYKDFKYCWENFVYNDDEPFKPWKGLKYNFLFLDSKLQEILE

SEQ ID NO: 33 - protein, 370 aa, Macaca mulatta
  REGION 1..370: note = MISC_FEATURE - Rhesus macaque APOBEC-3G polypeptide sequence
  REGION 1..61: note = MISC_FEATURE - Cytoplasmic localization signal
MVEPMDPRTFVSNFNNRPILSGLNTVWLCCEVKTKDPSGPPLDAKIFQGKVYSKAKYHPEMRFLRWFHKWRQLHHDQEYKVTWYVSWSPCTRCANSVATFLAKDPKVTLTIFVARLYYFWKPDYQQALRILCQKRGGPHATMKIMNYNEFQDCWNKFVDGRGKPFKPRNNLPKHYTLLQATLGELLRHLMDPGTFTSNFNNKPWVSGQHETYLCYKVERLHNDTWVPLNQHRGFLRNQAPNIHGFPKGRHAELCFLDLIPFWKLDGQQYRVTCFTSWSPCFSCAQEMAKFISNNEHVSLCIFAARIYDDQGRYQEGLRALHRDGAKIAMMNYSEFEYCWDTFVDRQGRPFQPWDGLDEHSQALSGRLRAI

SEQ ID NO: 34 - protein, 384 aa, Pan troglodytes
  REGION 1..384: note = MISC_FEATURE - Chimpanzee APOBEC-3G polypeptide sequence
  REGION 1..60: note = MISC_FEATURE - Cytoplasmic localization signal
  REGION 65..100: note = MISC_FEATURE - Nucleic acid editing domain
  REGION 257..291: note = MISC_FEATURE - Nucleic acid editing domain
MKPHFRNPVERMYQDTFSDNFYNRPILSHRNTVWLCYEVKTKGPSRPPLDAKIFRGQVYSKLKYHPEMRFFHWFSKWRKLHRDQEYEVTWYISWSPCTKCTRDVATFLAEDPKVTLTIFVARLYYFWDPDYQEALRSLCQKRDGPRATMKIMNYDEFQHCWSKFVYSQRELFEPWNNLPKYYILLHIMLGEILRHSMDPPTFTSNFNNELWVRGRHETYLCYEVERLHNDTWVLLNQRRGFLCNQAPHKHGFLEGRHAELCFLDVIPFWKLDLHQDYRVTCFTSWSPCFSCAQEMAKFISNNKHVSLCIFAARIYDDQGRCQEGLRTLAKAGAKISIMTYSEFKHCWDTFVDHQGCPFQPWDGLEEHSQALSGRLRAILQNQGN

SEQ ID NO: 35 - protein, 377 aa, Chlorocebus sabaeus
  REGION 1..377: note = MISC_FEATURE - Green monkey APOBEC-3G polypeptide sequence
  REGION 1..60: note = MISC_FEATURE - Cytoplasmic localization signal
  REGION 65..100: note = MISC_FEATURE - Nucleic acid editing domain
  REGION 257..290: note = MISC_FEATURE - Nucleic acid editing domain
MNPQIRNMVEQMEPDIFVYYFNNRPILSGRNTVWLCYEVKTKDPSGPPLDANIFQGKLYPEAKDHPEMKFLHWFRKWRQLHRDQEYEVTWYVSWSPCTRCANSVATFLAEDPKVTLTIFVARLYYFWKPDYQQALRILCQERGGPHATMKIMNYNEFQHCWNEFVDGQGKPFKPRKNLPKHYTLLHATLGELLRHVMDPGTFTSNFNNKPWVSGQRETYLCYKVERSHNDTWVLLNQHRGFLRNQAPDRHGFPKGRHAELCFLDLIPFWKLDDQQYRVTCFTSWSPCFSCAQKMAKFISNNKHVSLCIFAARIYDDQGRCQEGLRTLHRDGAKIAVMNYSEFEYCWDTFVDRQGRPFQPWDGLDEHSQALSGRLRAI

SEQ ID NO: 36 - protein, 384 aa, Homo sapiens
  REGION 1..384: note = MISC_FEATURE - Human APOBEC-3G polypeptide sequence
  REGION 1..60: note = MISC_FEATURE - Cytoplasmic localization signal
  REGION 65..100: note = MISC_FEATURE - Nucleic acid editing domain
  REGION 257..291: note = MISC_FEATURE - Nucleic acid editing domain
MKPHFRNTVERMYRDTFSYNFYNRPILSRRNTVWLCYEVKTKGPSRPPLDAKIFRGQVYSELKYHPEMRFFHWFSKWRKLHRDQEYEVTWYISWSPCTKCTRDMATFLAEDPKVTLTIFVARLYYFWDPDYQEALRSLCQKRDGPRATMKIMNYDEFQHCWSKFVYSQRELFEPWNNLPKYYILLHIMLGEILRHSMDPPTFTFNFNNEPWVRGRHETYLCYEVERMHNDTWVLLNQRRGFLCNQAPHKHGFLEGRHAELCFLDVIPFWKLDLDQDYRVTCFTSWSPCFSCAQEMAKFISKNKHVSLCIFTARIYDDQGRCQEGLRTLAEAGAKISIMTYSEFKHCWDTFVDHQGCPFQPWDGLDEHSQDLSGRLRAILQNQEN

SEQ ID NO: 37 - protein, 382 aa, Homo sapiens
  REGION 1..382: note = MISC_FEATURE - Human APOBEC-3B polypeptide sequence
  REGION 66..100: note = MISC_FEATURE - Nucleic acid editing domain
  REGION 251..289: note = MISC_FEATURE - Nucleic acid editing domain
MNPQIRNPMERMYRDTFYDNFENEPILYGRSYTWLCYEVKIKRGRSNLLWDTGVFRGQVYFKPQYHAEMCFLSWFCGNQLPAYKCFQITWFVSWTPCPDCVAKLAEFLSEHPNVTLTISAARLYYYWERDYRRALCRLSQAGARVTIMDYEEFAYCWENFVYNEGQQFMPWYKFDENYAFLHRTLKEILRYLMDPDTFTFNFNNDPLVLRRRQTYLCYEVERLDNGTWVLMDQHMGFLCNEAKNLLCGFYGRHAELRFLDLVPSLQLDPAQIYRVTWFISWSPCFSWGCAGEVRAFLQENTHVRLRIFAARIYDYDPLYKEALQMLRDAGAQVSIMTYDEFEYCWDTFVYRQGCPFQPWDGLEEHSQALSGRLRAILQNQGN

SEQ ID NO: 38 - protein, 395 aa, Rattus sp.
  REGION 1..395: note = MISC_FEATURE - Rat APOBEC-3B polypeptide sequence
MQPQGLGPNAGMGPVCLGCSHRRPYSPIRNPLKKLYQQTFYFHFKNVRYAWGRKNNFLCYEVNGMDCALPVPLRQGVFRKQGHIHAELCFIYWFHDKVLRVLSPMEEFKVTWYMSWSPCSKCAEQVARFLAAHRNLSLAIFSSRLYYYLRNPNYQQKLCRLIQEGVHVAAMDLPEFKKCWNKFVDNDGQPFRPWMRLRINFSFYDCKLQEIFSRMNLLREDVFYLQFNNSHRVKPVQNRYYRRKSYLCYQLERANGQEPLKGYLLYKKGEQHVEILFLEKMRSMELSQVRITCYLTWSPCPNCARQLAAFKKDHPDLILRIYTSRLYFWRKKFQKGLCTLWRSGIHVDVMDLPQFADCWTNFVNPQRPFRPWNELEKNSWRIQRRLRRIKESWGL

SEQ ID NO: 39 - protein, 226 aa, Bos taurus
  REGION 1..226: note = MISC_FEATURE - Bovine APOBEC-3B polypeptide sequence
DGWEVAFRSGTVLKAGVLGVSMTEGWAGSGHPGQGACVWTPGTRNTMNLLREVLFKQQFGNQPRVPAPYYRRKTYLCYQLKQRNDLTLDRGCFRNKKQRHAERFIDKINSLDLNPSQSYKIICYITWSPCPNCANELVNFITRNNHLKLEIFASRLYFHWIKSFKMGLQDLQNAGISVAVMTHTEFEDCWEQFVDNQSRPFQPWDKLEQYSASIRRRLQRILTAPI

SEQ ID NO: 40 - protein, 490 aa, Pan troglodytes
  REGION 1..490: note = MISC_FEATURE - Chimpanzee APOBEC-3B polypeptide sequence
MNPQIRNPMEWMYQRTFYYNFENEPILYGRSYTWLCYEVKIRRGHSNLLWDTGVFRGQMYSQPEHHAEMCFLSWFCGNQLSAYKCFQITWFVSWTPCPDCVAKLAKFLAEHPNVTLTISAARLYYYWERDYRRALCRLSQAGARVKIMDDEEFAYCWENFVYNEGQPFMPWYKFDDNYAFLHRTLKEIIRHLMDPDTFTFNFNNDPLVLRRHQTYLCYEVERLDNGTWVLMDQHMGFLCNEAKNLLCGFYGRHAELRFLDLVPSLQLDPAQIYRVTWFISWSPCFSWGCAGQVRAFLQENTHVRLRIFAARIYDYDPLYKEALQMLRDAGAQVSIMTYDEFEYCWDTFVYRQGCPFQPWDGLEEHSQALSGRLRAILQVRASSLCMVPHRPPPPPQSPGPCLPLCSEPPLGSLLPTGRPAPSLPFLLTASFSFPPPASLPPLPSLSLSPGHLPVPSFHSLTSCSIQPPCSSRIRETEGWASVSKEGRDLG

SEQ ID NO: 41 - protein, 190 aa, Homo sapiens
  REGION 1..190: note = MISC_FEATURE - Human APOBEC-3C polypeptide sequence
  REGION 65..100: note = MISC_FEATURE - Nucleic acid editing domain
MNPQIRNPMKAMYPGTFYFQFKNLWEANDRNETWLCFTVEGIKRRSVVSWKTGVFRNQVDSETHCHAERCFLSWFCDDILSPNTKYQVTWYTSWSPCPDCAGEVAEFLARHSNVNLTIFTARLYYFQYPCYQEGLRSLSQEGVAVEIMDYEDFKYCWENFVYNDNEPFKPWKGLKTNFRLLKRRLRESLQ

SEQ ID NO: 42 - protein, 190 aa, Gorilla sp.
  REGION 1..190: note = MISC_FEATURE - Gorilla APOBEC-3C polypeptide sequence
  REGION 65..100: note = MISC_FEATURE - Nucleic acid editing domain
MNPQIRNPMKAMYPGTFYFQFKNLWEANDRNETWLCFTVEGIKRRSVVSWKTGVFRNQVDSETHCHAERCFLSWECDDILSPNTNYQVTWYTSWSPCPECAGEVAEFLARHSNVNLTIFTARLYYFQDTDYQEGLRSLSQEGVAVKIMDYKDFKYCWENFVYNDDEPFKPWKGLKYNFRFLKRRLQEILE

SEQ ID NO: 43 - protein, 202 aa, Macaca mulatta
  REGION 1..202: note = MISC_FEATURE - Rhesus macaque APOBEC-3A polypeptide sequence
  REGION 72..103: note = MISC_FEATURE - Nucleic acid editing domain
MDGSPASRPRHLMDPNTFTFNFNNDLSVRGRHQTYLCYEVERLDNGTWVPMDERRGFLCNKAKNVPCGDYGCHVELRFLCEVPSWQLDPAQTYRVTWFISWSPCFRRGCAGQVRVFLQENKHVRLRIFAARIYDYDPLYQEALRTLRDAGAQVSIMTYEEFKHCWDTFVDRQGRPFQPWDGLDEHSQALSGRLRAILQNQGN

SEQ ID NO: 44 - protein, 185 aa, Bos taurus
  REGION 1..185: note = MISC_FEATURE - Bovine APOBEC-3A polypeptide sequence
  REGION 56..86: note = MISC_FEATURE - Nucleic acid editing domain
MDEYTFTENFNNQGWPSKTYLCYEMERLDGDATIPLDEYKGFVRNKGLDQPEKPCHAELYFLGKIHSWNLDRNQHYRLTCFISWSPCYDCAQKLTTFLKENHHISLHILASRIYTHNRFGCHQSGLCELQAAGARITIMTFEDFKHCWETFVDHKGKPFQPWEGLNVKSQALCTELQAILKTQQN

SEQ ID NO: 45 - protein, 200 aa, Homo sapiens
  REGION 1..200: note = MISC_FEATURE - Human APOBEC-3H polypeptide sequence
  REGION 54..88: note = MISC_FEATURE - Nucleic acid editing domain
MALLTAETFRLQFNNKRRLRRPYYPRKALLCYQLTPQNGSTPTRGYFENKKKCHAEICFINEIKSMGLDETQCYQVTCYLTWSPCSSCAWELVDFIKAHDHLNLGIFASRLYYHWCKPQQKGLRLLCGSQVPVEVMGFPKFADCWENFVDHEKPLSFNPYKMLEELDKNSRAIKRRLERIKIPGVRAQGRYMDILCDAEV

SEQ ID NO: 46 - protein, 210 aa, Macaca mulatta
  REGION 1..210: note = MISC_FEATURE - Rhesus macaque APOBEC-3H polypeptide sequence
MALLTAKTFSLQFNNKRRVNKPYYPRKALLCYQLTPQNGSTPTRGHLKNKKKDHAEIRFINKIKSMGLDETQCYQVTCYLTWSPCPSCAGELVDFIKAHRHLNLRIFASRLYYHWRPNYQEGLLLLCGSQVPVEVMGLPEFTDCWENFVDHKEPPSFNPSEKLEELDKNSQAIKRRLERIKSRSVDVLENGLRSLQLGPVTPSSSIRNSR

SEQ ID NO: 47 - protein, 386 aa, Homo sapiens
  REGION 1..386: note = MISC_FEATURE - Human APOBEC-3D polypeptide sequence
  REGION 78..109: note = MISC_FEATURE - Nucleic acid editing domain
  REGION 262..296: note = MISC_FEATURE - Nucleic acid editing domain
MNPQIRNPMERMYRDTFYDNFENEPILYGRSYTWLCYEVKIKRGRSNLLWDTGVFRGPVLPKRQSNHRQEVYFRFENHAEMCFLSWFCGNRLPANRRFQITWFVSWNPCLPCVVKVTKFLAEHPNVTLTISAARLYYYRDRDWRWVLLRLHKAGARVKIMDYEDFAYCWENFVCNEGQPFMPWYKFDDNYASLHRTLKEILRNPMEAMYPHIFYFHFKNLLKACGRNESWLCFTMEVTKHHSAVFRKRGVFRNQVDPETHCHAERCFLSWFCDDILSPNTNYEVTWYTSWSPCPECAGEVAEFLARHSNVNLTIFTARLCYFWDTDYQEGLCSLSQEGASVKIMGYKDFVSCWKNFVYSDDEPFKPWKGLQTNFRLLKRRLREILQ

SEQ ID NO: 48 - protein, 236 aa, Homo sapiens
  REGION 1..236: note = MISC_FEATURE - Human APOBEC-1 polypeptide sequence
MTSEKGPSTGDPTLRRRIEPWEFDVFYDPRELRKEACLLYEIKWGMSRKIWRSSGKNTTNHVEVNFIKKFTSERDFHPSMSCSITWFLSWSPCWECSQAIREFLSRHPGVTLVIYVARLFWHMDQQNRQGLRDLVNSGVTIQIMRASEYYHCWRNFVNYPPGDEAHWPQYPPLWMMLYALELHCIILSLPPCLKISRRWQNHLTFFRLHLQNCHYQTIPPHILLATGLIHPSVAWR

SEQ ID NO: 49 - protein, 229 aa, Mus musculus
  REGION 1..229: note = MISC_FEATURE - Mouse APOBEC-1 polypeptide sequence
MSSETGPVAVDPTLRRRIEPHEFEVFFDPRELRKETCLLYEINWGGRHSVWRHTSQNTSNHVEVNFLEKFTTERYFRPNTRCSITWFLSWSPCGECSRAITEFLSRHPYVTLFIYIARLYHHTDQRNRQGLRDLISSGVTIQIMTEQEYCYCWRNFVNYPPSNEAYWPRYPHLWVKLYVLELYCIILGLPPCLKILRRKQPQLTFFTITLQTCHYQRIPPHLLWATGLK

SEQ ID NO: 50 - protein, 224 aa, Homo sapiens
  REGION 1..224: note = MISC_FEATURE - Human APOBEC-2 polypeptide sequence
MAQKEEAAVATEAASQNGEDLENLDDPEKLKELIELPPFEIVTGERLPANFFKFQFRNVEYSSGRNKTFLCYVVEAQGKGGQVQASRGYLEDEHAAAHAEEAFFNTILPAFDPALRYNVTWYVSSSPCAACADRIIKTLSKTKNLRLLILVGRLFMWEEPEIQAALKKLKEAGCKLRIMKPQDFEYVWQNFVEQEEGESKAFQPWEDIQENFLYYEEKLADILK

SEQ ID NO: 51 - protein, 224 aa, Mus musculus
  REGION 1..224: note = MISC_FEATURE - Mouse APOBEC-2 polypeptide sequence
MAQKEEAAEAAAPASQNGDDLENLEDPEKLKELIDLPPFEIVTGVRLPVNFFKFQFRNVEYSSGRNKTFLCYVVEVQSKGGQAQATQGYLEDEHAGAHAEEAFFNTILPAFDPALKYNVTWYVSSSPCAACADRILKTLSKTKNLRLLILVSRLFMWEEPEVQAALKKLKEAGCKLRIMKPQDFEYIWQNFVEQEEGESKAFEPWEDIQENFLYYEEKLADILK

SEQ ID NO: 52 - protein, 224 aa, Rattus sp.
  REGION 1..224: note = MISC_FEATURE - Rat APOBEC-2 polypeptide sequence
MAQKEEAAEAAAPASQNGDDLENLEDPEKLKELIDLPPFEIVTGVRLPVNFFKFQFRNVEYSSGRNKTFLCYVVEAQSKGGQVQATQGYLEDEHAGAHAEEAFFNTILPAFDPALKYNVTWYVSSSPCAACADRILKTLSKTKNLRLLILVSRLFMWEEPEVQAALKKLKEAGCKLRIMKPQDFEYLWQNFVEQEEGESKAFEPWEDIQENFLYYEEKLADILK

SEQ ID NO: 53 - protein, 208 aa, Petromyzon marinus
  REGION 1..208: note = MISC_FEATURE - Petromyzon marinus CDA1 (pmCDAl) polypeptide sequence
MTDAEYVRIHEKLDIYTFKKQFFNNKKSVSHRCYVLFELKRRGERRACFWGYAVNKPQSGTERGIHAEIFSIRKVEEYLRDNPGQFTINWYSSWSPCADCAEKILEWYNQELRGNGHTLKIWACKLYYEKNARNQIGLWNLRDNGVGLNVMVSEHYQCCRKIFIQSSHNQLNENRWLEKTLKRAEKRRSELSFMIQVKILHTTKSPAV

SEQ ID NO: 54 - protein, 381 aa, Homo sapiens
  REGION 1..381: note = MISC_FEATURE - Human APOBEC3G D316R D317R polypeptide sequence
MKPHFRNTVERMYRDTFSYNFYNRPILSRRNTVWLCYEVKTKGPSRPPLDAKIFRGQVYSELKYHPEMRFFHWFSKWRKLHRDQEYEVTWYISWSPCTKCTRDMATFLAEDPKVTLTIFVARLYYFWDPDYQEALRSLCQKRDGPRATMKFNYDEFQHCWSKFVYSQRELFEPWNNLPKYYILLHFMLGEILRHSMDPPTFTFNFNNEPWVRGRHETYLCYEVERMHNDTWVLLNQRRGFLCNQAPHKHGFLEGRHAELCFLDVIPFWKLDLDQDYRVTCFTSWSPCFSCAQEMAKFISKKHVSLCIFTARIYRRQGRCQEGLRTLAEAGAKISFTYSEFKHCWDTFVDHQGCPFQPWDGLDEHSQDLSGRLRAILQNQEN

SEQ ID NO: 55 - protein, 182 aa, Homo sapiens
  REGION 1..182: note = MISC_FEATURE - Human APOBEC3G chain A polypeptide sequence
MDPPTFTFNFNNEPWWGRHETYLCYEVERMHNDTWVLLNQRRGFLCNQAPHKHGFLEGRHAELCFLDVIPFWKLDLDQDYRVTCFTSWSPCFSCAQEMAKFISKNKHVSLCIFTARIYDDQGRCQEGLRTLAEAGAKISFTYSEFKHCWDTFVDHQGCPFQPWDGLDEHSQDLSGRLRAILQ

SEQ ID NO: 56 - protein, 184 aa, Homo sapiens
  REGION 1..184: note = MISC_FEATURE - Human APOBEC3G chain A D120R D121R polypeptide sequence
MDPPTFTFNFNNEPWVRGRHETYLCYEVERMHNDTWVLLNQRRGFLCNQAPHKHGFLEGRHAELCFLDVIPFWKLDLDQDYRVTCFTSWSPCFSCAQEMAKFISKNKHVSLCIFTARIYRRQGRCQEGLRTLAEAGAKISFMTYSEFKHCWDTFVDHQGCPFQPWDGLDEHSQDLSGRLRAILQ

SEQ ID NO: 57 - protein, 367 aa, Homo sapiens
  REGION 1..367: note = MISC_FEATURE - hAPOBEC-4 polypeptide sequence
MEPIYEEYLANHGTIVKPYYWLSFSLDCSNCPYHIRTGEEARVSLTEFCQIFGFPYGTTFPQTKHLTFYELKTSSGSLVQKGHASSCTGNYIHPESMLFEMNGYLDSAIYNNDSIRHIILYSNNSPCNEANHCCISKMYNFLITYPGITLSIYFSQLYHTEMDFPASAWNREALRSLASLWPRVVLSPISGGIWHSVLHSFISGVSGSHVFQPILTGRALADRHNAYEINAITGVKPYFTDVLLQTKRNPNTKAQEALESYPLNNAFPGQFFQMPSGQLQPNLPPDLRAPVVFVLVPLRDLPPMHMGQNPNKPRNIVRHLNMPQMSFQETKDLGRLPTGRSVEIVEITEQFASSKEADEKKKKKGKK

SEQ ID NO: 58 - protein, 388 aa, Rattus norvegicus
  REGION 1..388: note = MISC_FEATURE - rAPOBEC-4 polypeptide sequence
MEPLYEEYLTHSGTIVKPYYWLSVSLNCTNCPYHIRTGEEARVPYTEFHQTFGFPWSTYPQTKHLTFYELRSSSGNLIQKGLASNCTGSHTHPESMLFERDGYLDSLIFHDSNIRHIILYSNNSPCDEANHCCISKMYNFLMNYPEVTLSVFFSQLYHTENQFPTSAWNREALRGLASLWPQVTLSAISGGIWQSILETFVSGISEGLTAVRPFTAGRTLTDRYNAYEINCITEVKPYFTDALHSWQKENQDQKVWAASENQPLHNTTPAQWQPDMSQDCRTPAVFMLVPYRDLPPIHVNPSPQKPRTVVRHLNTLQLSASKVKALRKSPSGRPVKKEEARKGSTRSQEANETNKSKWKKQTLFIKSNICHLLEREQKKIGILSSWSV

SEQ ID NO: 59 - protein, 363 aa, Macaca fascicularis
  REGION 1..363: note = MISC_FEATURE - mfAPOBEC-4 polypeptide sequence
MEPTYEEYLANHGTIVKPYYWLSFSLDCSNCPYHIRTGEEARVSLTEFCQIFGFPYGTTYPQTKHLTFYELKTSSGSLVQKGHASSCTGNYIHPESMLFEMNGYLDSAIYNNDSIRHIILYCNNSPCNEANHCCISKVYNFLITYPGITLSIYFSQLYHTEMDFPASAWNREALRSLASLWPRVVLSPISGGIWHSVLHSFVSGVSGSHVFQPILTGRALTDRYNAYEINAITGVKPFFTDVLLHTKRNPNTKAQMALESYPLNNAFPGQSFQMTSGIPPDLRAPVVFVLLPLRDLPPMHMGQDPNKPRNIIRHLNMPQMSFQETKDLERLPTRRSVETVEITERFASSKQAEEKTKKKKGKK

SEQ ID NO: 60 - protein, 218 aa, Rattus norvegicus
  REGION 1..218: note = MISC_FEATURE - rAPOBEC-1 (delta 177-186) polypeptide sequence
MSSETGPVAVDPTLRRRIEPHEFEVFFDPRELRKETCLLYEINWGGRHSIWRHTSQNTNKHVEVNFIEKFTTERYFCPNTRCSITWFLSWSPCGECSRAITEFLSRYPHVTLFIYIARLYHHADPRNRQGLRDLISSGVTIQIMTEQESGYCWRNFVNYSPSNEAHWPRYPHLWVRGLPPCLNILRRKQPQLTFFTIALQSCHYQRLPPHILWATGLK

SEQ ID NO: 61 - protein, 218 aa, Rattus norvegicus
  REGION 1..218: note = MISC_FEATURE - rAPOBEC-1 (delta 202-213) polypeptide sequence
MSSETGPVAVDPTLRRRIEPHEFEVFFDPRELRKETCLLYEINWGGRHSIWRHTSQNTNKHVEVNFIEKFTTERYFCPNTRCSITWFLSWSPCGECSRAITEFLSRYPHVTLFIYIARLYHHADPRNRQGLRDLISSGVTIQIMTEQESGYCWRNFVNYSPSNEAHWPRYPHLWVRLYVLELYCIILGLPPCLNILRRKQPQHYQRLPPHILWATGLK

SEQ ID NO: 62 - protein, 198 aa, Mus musculus
  REGION 1..198: note = MISC_FEATURE - mouse cytidine deaminase polypeptide sequence
  REGION 1..30: note = MISC_FEATURE - Nuclear localization sequence
  REGION 183..198: note = MISC_FEATURE - Nuclear export signal
MDSLLMKQKKFLYHFKNVRWAKGRHETYLCYVVKRRDSATSCSLDFGHLRNKSGCHVELLFLRYISDWDLDPGRCYRVTWFTSWSPCYDCARHVAEFLRWNPNLSLRIFTARLYFCEDRKAEPEGLRRLHRAGVQIGIMTFKDYFYCWNTFVENRERTFKAWEGLHENSVRLTRQLRRILLPLYEVDDLRDAFRMLGF

SEQ ID NO: 63 - protein, 224 aa, Petromyzon marinus
  REGION 1..224: note = MISC_FEATURE - pmCDA-1 polypeptide sequence
MAGYECVRVSEKLDFDTFEFQFENLHYATERHRTYVIFDVKPQSAGGRSRRLWGYIINNPNVCHAELILMSMIDRHLESNPGVYAMTWYMSWSPCANCSSKLNPWLKNLLEEQGHTLTMHFSRIYDRDREGDHRGLRGLKHVSNSFRMGVVGRAEVKECLAEYVEASRRTLTWLDTTESMAAKMRRKLFCILVRCAGMRESGIPLHLFTLQTPLLSGRVVWWRV

SEQ ID NO: 64 - protein, 331 aa, Petromyzon marinus
  REGION 1..331: note = MISC_FEATURE - pmCDA-2 polypeptide sequence
MELREVVDCALASCVRHEPLSRVAFLRCFAAPSQKPRGTVILFYVEGAGRGVTGGHAVNYNKQGTSIHAEVLLLSAVRAALLRRRRCEDGEEATRGCTLHCYSTYSPCRDCVEYIQEFGASTGVRVVIHCCRLYELDVNRRRSEAEGVLRSLSRLGRDFRLMGPRDAIALLLGGRLANTADGESGASGNAWVTETNVVEPLVDMTGFGDEDLHAQVQRNKQIREAYANYASAVSLMLGELHVDPDKFPFLAEFLAQTSVEPSGTPRETRGRPRGASSRGPEIGRQRPADFERALGAYGLFLHPRIVSREADREEIKRDLIVVMRKHNYQGP

SEQ ID NO: 65 - protein, 209 aa, Petromyzon marinus
  REGION 1..209: note = MISC_FEATURE - pmCDA-5 polypeptide sequence
MAGDENVRVSEKLDFDTFEFQFENLHYATERHRTYVIFDVKPQSAGGRSRRLWGYIINNPNVCHAELILMSMIDRHLESNPGVYAMTWYMSWSPCANCSSKLNPWLKNLLEEQGHTLMMHFSRIYDRDREGDHRGLRGLKHVSNSFRMGVVGRAEVKECLAEYVEASRRTLTWLDTTESMAAKMRRKLFCILVRCAGMRESGMPLHLFT

SEQ ID NO: 66 - protein, 158 aa, Saccharomyces cerevisiae
  REGION 1..158: note = MISC_FEATURE - yCD polypeptide sequence
MVTGGMASKWDQKGMDIAYEEAALGYKEGGVPIGGCLINNKDGSVLGRGHNMRFQKGSATLHGEISTLENCGRLEGKVYKDTTLYTTLSPCDMCTGAIIMYGIPRCVVGENVNFKSKGEKYLQTRGHEVVVVDDERCKKIMKQFIDERPQDWFEDIGE

SEQ ID NO: 67 - protein, 194 aa, synthetic construct
  REGION 1..194: note = cytidine deaminase polypeptide sequence
MKPQIRDHRPNPMEAMYPHIFYFHFENLEKAYGRNETWLCFTVEIIKQYLPVPWKKGVFRNQVDPETHCHAEKCFLSWFCNNTLSPKKNYQVTWYTSWSPCPECAGEVAEFLAEHSNVKLTIYTARLYYFWDTDYQEGLRSLSEEGASVEIMDYEDFQYCWENFVYDDGEPFKRWKGLKYNFQSLTRRLREILQ

SEQ ID NO: 68 - protein, 192 aa, synthetic construct
  REGION 1..192: note = cytidine deaminase polypeptide sequence
MADSSEKMRGQYISRDTFEKNYKPIDGTKEAHLLCEIKWGKYGKPWLHWCQNQRMNIHAEDYFMNNIFKAKKHPVHCYVTWYLSWSPCADCASKIVKFLEERPYLKLTIYVAQLYYHTEEENRKGLRLLRSKKVIIRVMDISDYNYCWKVFVSNQNGNEDYWPLQFDPWVKENYSRLLDIFWESKCRSPNPW

SEQ ID NO: 69 - protein, 280 aa, synthetic construct
  REGION 1..280: note = cytidine deaminase polypeptide sequence
MDPQRLRQWPGPGPASRGGYGQRPRIRNPEEWFHELSPRTFSFHFRNLRFASGRNRSYICCQVEGKNCFFQGIFQNQVPPDPPCHAELCFLSWFQSWGLSPDEHYYVTWFISWSPCCECAAKVAQFLEENRNVSLSLSAARLYYFWKSESREGLRRLSDLGAQVGIMSFQDFQHCWNNFVHNLGMPFQPWKKLHKNYQRLVTELKQILREEPATYGSPQAQGKVRIGSTAAGLRHSHSHTRSEAHLRPNHSSRQHRILNPPREARARTCVLVDASWICYR

SEQ ID NO: 70 - protein, 555 aa, synthetic construct
  REGION 1..555: note = pYY-BEM3.1; tr|F7B644|F7B644_HORSE polypeptide sequence
MPRGRARERQRRNPMEKLDAEAFSFHFLNMEFVYDRNCSYLCYQVEGRLSGSPVLSEQGVFPNEVCGKTRRHAELCFLDWFRGRLSPDEYYCVTWFISWSPCSNCAREVAEFLKRHRNVELSIFAARLYYCRDHEQGLQSLCNRGAQLAVMLRKDFTYCWDNFVHNSGREFSPWENIDANSDLLARKLEDLLKNPMEKLHRKTFSFHFRNLKFAKGRKCSYLCYRVEGRLSGSPGLSEQGVFLNEVCDENCRHAELCFLHWFRGRLSPHADYRVTWFISWSPCSNCAREVAEFLKQHRNVELHISAARLYYWQRNKPGLRNLRSSGAQLAIMFFWDFRDCWDNFVHNSGRHFIPWKKINVNSRLLATKLEDLLKNPLEKLHPNTFSFHFCNLEFAYDRKYSYLCYQVEGRLSGSPGLSEQGVFLNEVCGKTRCHAELCFLDWFRVRLSPDEYYRVTWFISWSPCFYCAREVADFLKQYRNVKLSIFAARLYYCRDHAQGLRSLCSSGAQLAIMFFWDFRYCWDNFVHNSGREFRPWKKINVNSRLLATKLEDILK

SEQ ID NO: 71 - protein, 437 aa, synthetic construct
  REGION 1..437: note = pYY-BEM3.2; tr|D1LZA1|D1LZA1_PANTI polypeptide sequence
MEPWRPSPRNPMDRIDPKTFRFQFPNLRYASGRKLCYLCFQVERDYFYYNDSDWGVFRNEVHPWAPCHAEQCFLSWFRDQYPYRDEDYNVTWFLSWSPCPTCAEEVVEFLEEYRNLTLSIFTSRLYYFWHPNYQEGLCKLWDAGVQLDIMSCDEFEYCWDNFVYHKGMRFQRRNLLKDYDFLAAKLQEILSPGQQRKRDWPFPPRPGAQVDPRSWVQEVTEPGINTRRHPLHLLVSFLLPRPTMNPLQEDIFYRQFGNQHRVPKPYYYRRKTYLCYQLKLPEGTLIDKDCLRNKKKRHAEICFIDKIKSLTRDTSQRFEIICYITWSPCPFCAEELVAFVKDNPHLSLRIFASRLYVHWRWKYQQGLRHLHASGIPVAVMSLPEFEDCWRNFVDHQDRLFQPWRNLDQYSESIKRRLGKILTPLNDLRNDFRNLKLE

SEQ ID NO: 72 - protein, 440 aa, synthetic construct
  REGION 1..440: note = pYY-BEM3.3; tr|A0A3Q0DM17|A0A3Q0DM17_TARSY polypeptide sequence
MPMKRMYSNIYFDHFNNQRLLSGQNAPWLCFKVERVENCMLVPLETGVFGNQVSGCCGKTERPVEPTSLTRSVLVSPNPGTELRAQQPSRKGHLGKLGCVEYPSPGLALVMLGYGASTYCPDSSMYCPETCHHPEMCFLYWFEKTLSHEEQYQITWYVSWSPCVNCAEEVAEFLSVHPKVNLTIYAARLYCYQKLNHRQGLRRLCKEGACVKIMNYEEFDHCWENFVYNNYKSFKPWVKLQDNYELLATELDKILRIPMERMPQKKFRFHFQNLIAKDRNTTWLCFEVKNVRKKHPPDLLERGIFQNQVTPRINCHAEMCFLSWFLENMLLHGKRYQVTWYISWSPCSICAEEVAEFLSAHPKVSLTIYAARLYYFWVPGYRQGLRRLVEEGARVEIMNYEEFDYCWENFVSINNEPFQPWEGLHEKYGYLVTKLNNILG

SEQ ID NO: 73 - protein, 453 aa, synthetic construct
  REGION 1..453: note = pYY-BEM3.4; tr|A0A3Q0DNJ5|A0A3Q0DNJ5_TARSY polypeptide sequence
MEDNPEPRPRQQMDQDTFIFNFNNDPSVRGRHQTFLCYEVEHLDDDTWVPQDKYLGFLHNQPQSRSNAYCAYHAELCFLELVSSWQLDPAQRYRVTCFISWSPCSSCAQEVAAFLKKNRHVTLRILAARIYDYYQGYEDGLRTLQGVGVDITVMTSAEFGHCWNTFVDHQGSPFQPWEGLDQHSQVIWQRMQDILQVIPAKYLMEKVKYTVTVDILFKGRVPGPRYLMDQNTFTRNFINNLSVSGRRQTLLCYEVERLGGDIWVPLDQLRGFLLSQARDVLNYYQGRHAEPCFLDLVSSWQLDPAQHYRVTWFISWSPCTSCAQAVAAFLRENRHVTLRILAARIYDYHQGYEEGLRTLQRTGAHIDIMTFKEFGHCWNTFVNHKGSPFKSWTGLDQHSQALRKRLQDILHTMASSLWDQSEPKKPIPSQEVTLPESIPPSHGNRFRLVKRPS

SEQ ID NO: 74 - protein, 424 aa, synthetic construct
  REGION 1..424: note = pYY-BEM3.5; tr|G5AYU5|G5AYU5_HETGA polypeptide sequence
FCFLSCVHRKPIERIYKKAFRFYFRNLRCAYGRNKTFLCYEVKRERDNKVLHKGVVLNQVEPYMPLHAELRFLSWFHDTLLCPLGSYQVTLYVSWSPCSECAEELTTFLAGHRNVTMTIYVAQLYYCNWKSPNREGLKILIAEDARLRVMFYDEFLYCWRNFVKNDYNNFDPWSLLDENSRYHNRILQNILKGWGRPHRVGPEGEQTATPGGSGGHCISVFSLLRRREMTLKEETFRVQFNNAYKAPKPYRRRVTYLCYQLQEANGDPLTKGCLRTKKGYHAESRFIKRICSMDLGQDQSYQVTCFLTWSPCPHCAQELVSFKRAHPHLRLQIFTARLFFHWKRSYQEGLQRLCRAQVPVAVMGHPEFAYCWDNFVDHQPGPFEPPWAKLEYYSSCLKRRLQQILRSWGVDDLTNDFRNLQLGP

SEQ ID NO: 75 - protein, 385 aa, synthetic construct
  REGION 1..385: note = pYY-BEM3.6; tr|A0A2Y9QMV5|A0A2Y9QMV5_TRIMA polypeptide sequence
MLSSPQTPGTRKPMKTLAPDEFSFNFENLRLAHGRNTTFLCFQVETKAPPSLNSPDSGIFQNQDHCPSHHHAEMVFLTWFQKRLSPAQHYEVTWYMSWSPCSRCAVQVAKFLKSNSTVNLSIFVARLYYPRELETKDGLHSLWQAGAQVQIMFFQDFKYCWENFVNNEGKPFQPWKNLDENSKDWDTELKDIHRNTTDLLTEEMFYSQFYNREKKSSIPRKTYLCYQLNEPQPVKRCLHYKKGYHAVTRFIDGIVSMNLDPARSYDITCYFTWSPCNRYARKLVSFIEDYPNLRLKVYTSRLYFHWCWTNMQGLQHLQNSRVTVAVMTFRDFEYCWKNFVDNQGKPFEPWEKLDLYSQSTERRLRRILKPLTPDVLNEDFGNLHL

SEQ ID NO: 76 - protein, 381 aa, synthetic construct
  REGION 1..381: note = pYY-BEM3.7; tr|H0XHI0|H0XHI0_OTOGA polypeptide sequence
LSCAFRDPMNRMYPKTFCQNFEKEPCPSNQNSSWLCFEVETKNSAVFFHRGVFRNQPAPPPRAPTSVLLSQGPVKTPCHAEECFLTWIQGVLPPDHHYHVTWYVSRGPCANCANLIVHFLAMHRRVTLTIFAAHLNFFWESDFQQGLLRMDQEGVQLHIMGYEEFEYCWDNFVYNQRKQFVPWNGLNENYEFMVSTLEDILRSPLDRIRQKDFSIHFRNSLWLDDKSTWLCFEVKRTKSPVPLYRGVFRNQSPPKTPCHAEVRFFTWLQDLPPDFCCQFTWYLSWSPCADCADLVANFLAKHRNVSLTIFVARLYYYRDPEMHRGLRRMYQEGANVDIMSVIEFEYCWDNFVYNQGKQFVPWNGLNENYEFLVPRLQEILE

SEQ ID NO: 77 - protein, 337 aa, synthetic construct
  REGION 1..337: note = pYY-BEM3.8; tr|A0A3M0K4Y7|A0A3M0K4Y7_HIRRU polypeptide sequence
MYISKKALRRHFDPRVYPRETYLLCELQWEGSRRVWIHWIRNVPDHHAEEYFLEEVFEPRNYGFCNITLYLSWSPCCTCCSKIRDFLKRNPNVKIDIRVARLIYPDYAETRSSLRELNGLQRVSIQVMEAAGLSCIESKNHRISQVERDPKGSSSPTLFTLQDHLKLSNMTESVIQDSVSIQICYQMRILGFQCHIRWKLQPEDFQRNYSPNQIGRVVYLLYEVRWRRGSIWRNWCSNNPEQHAEVNFLENHFHHRPQTPCSITWFLSTSPCGKCSRRILEFLKSQPNVTLEIYAAKLFRHHDIRNRQGLRNLMMNGVTIYIMNLEGNPASLCLSVD

SEQ ID NO: 78 - protein, 237 aa, synthetic construct
  REGION 1..237: note = pYY-BEM3.9; tr|A0A3P4LUZ8|A0A3P4LUZ8_GULGU polypeptide sequence
MSFEDYEYCWETFVDHKGMYFQSWDLLRDNDLLAAELKNILRSTMNPLRQEIFYHQFGNQPRAPRPYHRRKTYLCYQLQPHEGPITARVCLQNKKKRHAEIRFIDNIRALRLDRSQTFEITCYLTWSPCPTCAKALAVFVQDHPHISLRLFASRLFIHWCWKYQEGLRLLHRSRIPVAVMRLQEFEDCWRNFVDNQDEPFQPWNKLEQYSESITRRLRRILGHPQNNLENDFRNLHI

SEQ ID NO: 79 - protein, 221 aa, synthetic construct
  REGION 1..221: note = pYY-BEM3.10; tr|G5BPM8|G5BPM8_HETGA polypeptide sequence
RRRIEPWQFEASFDPRQLRRETCLLSEVRWGTSPRAWRGCSLNTARHAEVSFMDRLTSEGRLRGPVRCSITWFLSWSPCGACAQAIGEFLRQHPNVSLVIYIARLFWHVDEQNRQGLRDLVTRGVRMQVMSDPEFAHCWRNFVNYSPGQEARWPQVPPVWTWLYSLELHCILLNLPPCLKISRRHHNQLTFFQLILQNCHYQAIPSPVLLASGLIHPFVTW

SEQ ID NO: 80 - protein, 211 aa, synthetic construct
  REGION 1..211: note = pYY-BEM3.11; tr|H2M862|H2M862_ORYLA polypeptide sequence
MITKLDSVLLPKKKFIYHYKNMRWARGRHETYLCFVVKRRVGPESLSFDFGHLRNRNGCHVELLFLRHLSALCPGLWGYGATGQGRVSYSITWFCSWSPCANCSFRLAQFLSQTPNLRLRIFVSRLYFCDLEDSREREGLRMLKKVGVHITVMSYKDYFYCWQTFVARKQSKFKPWDGLHQNSVRLSRKLNRILQPCETEDFRDAFKLLGL

SEQ ID NO: 81 - protein, 353 aa, synthetic construct
  REGION 1..353: note = pYY-BEM3.12; tr|H0Y0C6|H0Y0C6_OTOGA polypeptide sequence
MYLKTFYRHFNNRPYLSRRNDTWLCFEVKTTSSNSPGSFYSGVFRNQGPRYCPWHTELCFLTWVRPIVSHHHFYQITWYMSWSPCANCAWQVATFLATHENVSLTNYTVRIYYFWRQDYRQGLLRMIEEGTQVYVMSSKEFQHCWENFVDHWGTRWVTCWNRLKKNYEFLVTRLSEILSDPKERISPNTFYNQFNNTPVPRGRKDTWLCFEVKEKNSNSPGSFHRGVFQNQVFSGTSSHARRCPPDHHYEVTWYTSWSPCAHCAWHVVNFLTSNPNVSLTIFAARLYYIYRPEIQQGLRRVFQEGAKVHIMSLKEFKYCWAKLVYNSGMRFMPWYQFNFNFLFPNTTLKGDLH

SEQ ID NO: 82 - protein, 189 aa, synthetic construct
  REGION 1..189: note = pYY-BEM3.13; tr|A0A3Q2Z5X6|A0A3Q2Z5X6_HIPCM polypeptide sequence
MDVHFMNFIYHYKNMRWAKGRNETYLCFVVKRRVGPNSLTFDFGHLRNRNGCHVELLFLRYLGRRLSYSITWFCSWSPCANCSAALSQFLSRMPNLRLRIFVARLYFCDMEDSHEREGLRLLQKAGVQVTVMSYKDYYYCWQTFVDRKKSHFKAWEDLHQNSVRLSRKLNRILQPCEMDLRDAFKLLGL

SEQ ID NO: 83 - protein, 190 aa, synthetic construct
  REGION 1..190: note = pYY-BEM3.15; tr|A0A2K6NY90|A0A2K6NY90_RHIRO polypeptide sequence
MNPHIRNPMEAMYPGTFYFHFKNLWEADNRNESWLCFAVEVIKHHSTVSWKRGVFRNQVDPETHCHAEKCFLSWFCDNTLSPKKNYQVTWYTSWSPCPECAREVAKFLARHSNVMLTIYTARLYYSQYPNYQEGLRRLNEEGVPVEIMDYEDFKYCWENFVYNGDELFKPWKGLKYNFLFLDSKLQEILE

SEQ ID NO: 84 - protein, 202 aa, synthetic construct
  REGION 1..202: note = pYY-BEM3.16; tr|Q6ICH2|Q6ICH2_HUMAN polypeptide sequence
MNPQIRNPMERMYRDTFYDNFENEPILYGRSYTWLCYEVKIKRGRSNLLWDTGVFRGPVLPKRQSNHRQEVDPETHCHAERCFLSWFCDDILSPNTNYEVTWYTSWSPCPECAGEVAEFLARHSNVNLTIFTARLCYFWDTDYQEGLCSLSQEGASVKIMGYKDFVSCWKNFVYSDDEPFKPWKGLQTNFRLLKRRLREILQ

SEQ ID NO: 85 - protein, 202 aa, synthetic construct
  REGION 1..202: note = pYY-BEM3.17; tr|G8GPV1|G8GPV1_CERNE polypeptide sequence
MDGSPASRPGHVMDPGTFTSNFNNKPWVSGQRETYLCYKVERSHNDTWVLLNQHRGFLRNQAKNRLHGDYGCHAELCFLGEVPSWRLDPTQTYRVTWFISWSPCFSGGCAEQVRAFLQENTHVRLRIFAARIYDYDFLYQEALRTLRDAGAQVSIMTYEEFKHCWDTFVDHQGRPFQPWDGLDEHSQALSGRLQAILQNQGN

SEQ ID NO: 86 - protein, 181 aa, synthetic construct
  REGION 1..181: note = pYY-BEM3.18; tr|Q1WBT6|Q1WBT6_SYMSY polypeptide sequence
MALLTAKTFRLQFNNKRRVTKPYYPRKALLCYQLTPQNGSTPTRGYFKNKKKRHAEIRFINKIKSMGLDETQCYQVTCYLTWSPCPSCAWELVDFIKAHDHLNLGIFASRLYYHWCRHQQEGLRLLCGSQVPVEVMGFPEFADCWENFVDHEEPLSFNPSEMLEELDKNSRAIKRRLEKIK

SEQ ID NO: 87 - protein, 211 aa, synthetic construct
  REGION 1..211: note = pYY-BEM3.19; tr|A0A3B4CS14|A0A3B4CS14_PYGNA polypeptide sequence
MDNTNRRKFIYHYKNVRWARGRHETYLCFVVKKRNSPDSLSFDFGHLRNRNGCHVELLFLRYIEVLCPGLWGSGVDGVRVSYAVTWFCSWSPCSNCAQRLTNFLSQTPNLRLRIFVARLYFCDEEDSLEREGLRHLQRAGVQITVMTYKDFFYCWQTFVASRERCFKAWEGLRQNSVRLSRKLNRILQVFISTPVISPLITTHLGQSWAGG

SEQ ID NO: 88 - protein, 315 aa, synthetic construct
  REGION 1..315: note = pYY-BEM3.20; tr|A0A087XZI4|A0A087XZI4_POEFO polypeptide sequence
RKVSYSVTWFCSWSPCANCSIRLAQFLHQTPNLRLRIFVSRLYFCDLEDSREREGLRILKKAGVHITVMSYKDYFYCWQTFVAKSQSKFKPWDGLHQNYIRLSRKLNRILQPALDIKKFIYHYKNLRWARGRCETYLCFVVKKKLHLFMFVIVGRNRLFDLNVTMNNKSLYLIPLHLQLLFLRHLGALCPGLWGYGVTGERKVSYSVTWFCSWSPCANCSIRLAQFLHQTPNLRLRIFVSRLYFCDLEDSREREGLRILKKAGVHITVMSYKDYFYCWQTFVAKSQSKFKPWDGLHQNYIRLSRKLNRILQVQFF

SEQ ID NO: 89 - protein, 189 aa, synthetic construct
  REGION 1..189: note = pYY-BEM3.21; tr|A0A341AEK4|A0A341AEK4_9CETA polypeptide sequence
MASDRGPSAGDATSRRRIEPWEFEVSFDPRELCKETRLLYEIKWGRSQHVWRHSGKNTTNHVECNFIEKFTSERPFHRSVSCCITWFLSWSPCWECSKAIREFLNQHPRVTLFIYVARLFQHMDPQNRQGLRDLIHSGVTIQIMGPTEYDYCWRNFVNYPPGKEAHWPRYPPPLMKLYALELHCIILVP

SEQ ID NO: 90 - protein, 180 aa, synthetic construct
  REGION 1..180: note = pYY-BEM3.22; tr|E2D879|E2D879_MUSMI polypeptide sequence
RNLISRETFNFNFENLCYAKGRKNTFLCYEVTRKDCDSPVSLCHGVFKNKGSIHAEICFLYWFHDKVLKVLTPREEFKVTWYMSWSPCFECAEQVVRFLATHHNLNLTIFSSRLYNVSDPDTQQKLCRLVQEGAQVAVMDLSEFKKCWEKFVDNDGQQFRPWKRLRTNFRYQNSKLQEIL

SEQ ID NO: 91 - protein, 221 aa, synthetic construct
  REGION 1..221: note = pYY-BEM3.23; tr|A0A2K5RDN6|A0A2K5RDN6_CEBCA polypeptide sequence
MWEAQSPGLSREWGSVAISPEDPGPLHIGRFLSCAFRHPMNAMYPGIFNFHFRNLRKAYGRNETWLCFTVEGIMNRSTVSWKSGVFRNQVGSDPFCHAEMCFLSWFRHNMLSPKKDYEVTWYASWSPCPECAGQVAEFLARHGNVRLTIFTAHLYYFWNPSFRQGLRRLSQEGASVLIMGYEDFEYCWDNFVYNDGQPFKPWKRLQDNSLSLYITLQEILQ

SEQ ID NO: 92 - protein, 206 aa, synthetic construct
  REGION 1..206: note = pYY-BEM3.24; tr|A0A2K5RDN7|A0A2K5RDN7_CEBCA polypeptide sequence
MEASPASRPRPLMGPRTFTENFTNNPEVFGRHQTYLCYEVKCQGPDGTRDLMTEQRDFLCNQARNLLSGFDGRHAERCFLDRVPSWRLDPAQTYRVTCFISWSPCFSCAREVAEFLQENPHVNLRIFAARIYDCRPRYEEGLQMLQNAGAQVSIMTSEEFRHCWDTFVDHQGHPFQPWEGLDEHSQALSRRLQAILQGNRWMILSL

SEQ ID NO: 93 - protein, 184 aa, synthetic construct
  REGION 1..184: note = pYY-BEM3.25; tr|A0A1C9CJ69|A0A1C9CJ69_CERAL polypeptide sequence
NPMKAMDPHIFYFHFKNLRKAYGRNETWLCFAVEIIKQRSTVPWRTGVFRNQVDPESHCHAERCFLSWFCEDILSPNTDYRVTWYTSWSPCLDCAGEVAEFLARHSNVELAIFAARLYYFWDTHYQQGLRSLSEKGASVEIMGYEDFKYCRENFVCDDGKPFKPWKGLKTNFRFLKRRLQEILE

SEQ ID NO: 94 - protein, 197 aa, synthetic construct
  REGION 1..197: note = pYY-BEM3.26; tr|A0A2R2Z4D2|A0A2R2Z4D2_PTEAL polypeptide sequence
MHLQVWRKVTEAWREGYTLKPWSRNPMERLYHDYFYFHFYNLPTPKHRNGCYICYQVEGTKKHSRMPLLRGVFENQESLDMMLSPGEKYRVTWYISWSPCFACVDEVIKFLREHTNVELIIFAARLYHSDILQYRQGLRKLHDAGVHVAIMSYYEFKHCLNDFVFHQGRSFCPWNDLNKNSKNLSNTLEDILRNQED

SEQ ID NO: 95 - protein, 206 aa, synthetic construct
  REGION 1..206: note = pYY-BEM3.27; tr|B7T161|B7T161_SHEEP polypeptide sequence
MTEGWAGSGLPGRGDCVWTPQTRNTMNLLRETLFKQQFGNQPRVPPPYYRRKTYLCYQLKELDDLMLDKGCFRNKKQRHAEIRFIDKINSLNLNPSQSYKIICYITWSPCPNCASELVDFITRNDHLNLQIFASRLYFHWIKPFCRGLHQLQKAGISVAVMTHTEFEDCWEQFVDNQLRPFQPWDKLEQYSASIRRRLQRILTAPT

SEQ ID NO: 96 - protein, 205 aa, synthetic construct
  REGION 1..205: note = pYY-BEM3.28; tr|A0A2R2X2G4|A0A2R2X2G4_PTEAL polypeptide sequence
MAGLGQACEGCCGQMPEISYPMGRLDPKTFSFEFKNLPYAYGRKSSYLCFQVEREQHSSPVPSDWGVFKNQFCGTEPYHAELCFLNWFRAEKLSPYEHYDVTWFLSWSPCSTCAEEIAIFLSNHKNVRLNIFVSRIYYFWKPAFRQGLQELDHLGVQLDAMSFDEFKYCWENFVDNQGMPFRCWKKVHQNYKSVLRKLNEILRRR

SEQ ID NO: 97 - protein, 309 aa, synthetic construct
  REGION 1..309: note = pYY-BEM3.29; tr|G1Q1M4|G1Q1M4_MYOLU polypeptide sequence
YAELSFLDLFQSWNLDRGRQYRLTWYMSWSPYPDCAQKLVEFLGENSHVTLRIFAADIHSLCSGYEDGLRKLRDARAQLAIMTRDELQYCWVTFVDNQGQPFRPWPNLVEHIKTKKQELKDILGNPMRRMYPKTFNFNFQNLNSYGRKSTFLCFEVETWEDGSVLDYQNGVFQNQLDPGHAELCFIEWFHEKVLFPDEVRCPDAQYHVTWYISWSPCFECAEQVAGFLNEHENVDLSISAARLYLCEDEDEQGLQDLVAAGAKVAMMAPEDFEYCWDNFVYNRGWPFTYWKHVRRNYGRLQEKLDEILW

SEQ ID NO: 98 - protein, 216 aa, synthetic construct
  REGION 1..216: note = pYY-BEM3.30; tr|A0A1S3AN78|A0A1S3AN78_ERIEU polypeptide sequence
RRIEPWEFEDFFDPRQFRPETCLLYEVRWGSSRNAWRSTARNTTRHAEVNFLERFAAERHFDKPVSCSITWFLSWSPCWECSQAIGAFLSQHPQVTLAIHVTRLFHHEDEQNRQGLRDLLARGVTLQVMGDSEYAHCWRTFVNSPPGAEGHYPRYPSDFTRLYALELHCIILGLPPCLEILRRYQNQFTLFRLVPQNCHYQMIPHLNFFVVRHYFF

SEQ ID NO: 99 - protein, 201 aa, synthetic construct
  REGION 1..201: note = pYY-BEM3.32; tr|Q4VUI3|Q4VUI3_XENLA polypeptide sequence
MTMDSMLLKRNKFIYHYKNLRWARGRHETYLCYIVKRRYSSVSCALDFGYLRNRNGCHAEMLFLRYLSIWVGHDPHRNYRVTWFSSWSPCYDCAKRTLEFLKGHPNFSLRIFSARLYFCEERNAEPEGLRKLQKAGVRLSVMSYKDYFYCWNTFVETRESGFEAWDGLHENSVRLARKLRRILQPPYDMEDLREVFVLLGL

SEQ ID NO: 100 - protein, 191 aa, synthetic construct
  REGION 1..191: note = pYY-BEM3.33; tr|E2RL86|E2RL86_CANLF polypeptide sequence
MNPLQEETFYQQFSNQRVPKPTYQRRTYLCYQLKPHEGSVIAKVCLQNQEKRHAEICFIDDIKSRQLDPSQKFEITCYVTWSPCPTCAKKLIAFVNDHPHISLRLFASRLYFHWRQKYKRELRHLQKSGIPLAVMSYLEFKDCWEKFVDHKGRPFQPWNKLKQYSESIGRRLQRILQPLNNLENDFRNLRL

SEQ ID NO: 101 - protein, 226 aa, synthetic construct
  REGION 1..226: note = pYY-BEM3.34; tr|G1LWB0|G1LWB0_AILME polypeptide sequence
SSAAPASIHLLDEDTFTENFRNDDWPSRTYLCYKVEGPDQGSGVPLGQDKGILHNKPAQGPEPSRHAECYLLEQIQSWNLDPKLHYGVTCFLSWSPCAKCAQKMARFLQENSHVSLKLFASRLYTRERWDEDYKEGLRTLKRAGASIAIMTYREFEHCWKTFVLHDQEGSCFQPWPFLHKESQKFSEKLQAILQVGVLLLSLPPPLPSSPLSSPWPFPAPLRASTG

SEQ ID NO: 102 - protein, 238 aa, synthetic construct
  REGION 1..238: note = pYY-BEM3.35; tr|A0A1U7S7K7|A0A1U7S7K7_ALLSI polypeptide sequence
MGEHWQYAGSGEYIPQDQFEENFDPSVLLAETHLLSELTWGGRPYKHWYENTEHCHAEIHFLENFSSKNRSCTITWYLSWSPCAECSARIADFMQENTNVKLNIHVARLYLHDDEHTRQGLRYLMKMKRVTIQVMTIPDYTYCWNTFLEDDGEDESDDYGGYAGVHEDEDESDDDDYLPTHFAPWIMLYSLELSCILQGFAPCLKIIQGNHMSPTFQLHVQDQEQKRLLEPANPWGAD

SEQ ID NO: 103 - protein, 220 aa, synthetic construct
  REGION 1..220: note = pYY-BEM3.36; tr|A0A2R2X2J8|A0A2R2X2J8_PTEVA polypeptide sequence
MPRIGNMNLLSEKTFNYHFGNQLRVKKPQGRRRTYLCYKLKLPNETLVKGYFINKKKNHAEIRFINKIRSLNLDQTQSYKITCYITWSPCSYCAGKLVALVKSCPHLSLQIFTSRLYYHWLWKNQAGLRYLWKINISVLVMKEPEFADCWDNFVNHQSRRFKPWEKLTQYSNSTERRLLRILRINRTDLFLAQSSEQDPGLNDLVDAIKRLFLDAHRPRD

SEQ ID NO: 104 - protein, 198 aa, synthetic construct
  REGION 1..198: note = pYY-BEM3.37; tr|A0A151P6M4|A0A151P6M4_ALLMI polypeptide sequence
MAVEEEKGLLGTSQGWKIELKDFQENYMPSTWPKVTHLLYEIRWGKGSKVWRNWCSNTLTQHAEVNCLENAFGKLQFNPPVPCHITWFLSWSPCCQCCRRILQFLRAHSHITLVIKAAQLFKHMDERNRQGLRDLVQSGVHVQVMDLPDYRYCWRTFVSHPHEGEGDFWPWFFPLWITFYTLELQHILLQQHALSYNL

SEQ ID NO: 105 - protein, 158 aa, synthetic construct
  REGION 1..158: note = pYY-BEM3.38; tr|A0A2K6MNR2|A0A2K6MNR2_RHIBE polypeptide sequence
IWLCFTMEIIKQCSTVSWKRGVFRNQVDPETHCHAERCFLSWFWEDTLSPNTNYQVTWYTSWSPCLDCAGEVAEFLARHSNVKLAIFAARLYYFWDTDYQQGLRSLSEEGTSVEIMGYEDFKYCWENFVYNGDEPFKPWKGLKYNFLFLDSKLQEILE

SEQ ID NO: 106 - protein, 182 aa, synthetic construct
  REGION 1..182: note = pYY-BEM3.40; tr|F1CGT0|F1CGT0_ANOCA polypeptide sequence
KAAILLSNLFFRWQMEPEAFQRNFDPREFPECTLLLYEIHWDNNTSRNWCTNKPGLHAEENFLQIFNEKIDIKQDTPCSITWFLSWSPCYPCSQAIIKFLEAHPNVSLEIKAARLYMHQIDCNKEGLRNLGRNRVSIMNLPDYRHCWTTFVVPRGANEDYWPQDFLPAITNYSRELDSILQD

SEQ ID NO: 107 - protein, 230 aa, synthetic construct
  REGION 1..230: note = pYY-BEM3.41; tr|C7AGG3|C7AGG3_HORSE polypeptide sequence
MDPQAPTQRGGLGQAYQGGDYVQAPGNGNTQHLLSEDVFKKQFGNQRRVTKPYYRRKTYVCYQLKLLRGPTIAKGYFRNKKKRHAEIRFIDKINSLGLDQDQSYEITCYVTWSPCATCACKLIKFTRKFPNLSLRIFVSRLYYHWFRQNQQGLRQLWASSIPVVVMGYQEFADCWENFADNRGNPFQSWEKLTEYSKGIKRRLQKILEPLNLNGLEDAMGNLKLGSVDLG

SEQ ID NO: 108 - protein, 197 aa, synthetic construct
  REGION 1..197: note = pYY-BEM3.42; tr|A0A250YMK7|A0A250YMK7_CASCN polypeptide sequence
MSLLKEDIFLYQFNNQQQVQKPYFRRRTYLCYQLEQPNGSRPQWPAKGCLQNKKGHHAEIRFIKRIHSMGLEQDQDYQITCYITWSPCLACACALAELKNHFPRLTLRIFASRLYFHWIRKFQMGLQHLYKSGVLVAVMSLPEFTDCWEKFVNHRQVFFTPWDKLEEHSRSIQRRLRRILQSWDVDDLTDDFRNLRL

SEQ ID NO: 109 - protein, 189 aa, synthetic construct
  REGION 1..189: note = pYY-BEM3.43; tr|B7T160|B7T160_SHEEP polypeptide sequence
MPWISDHVARLDPETFYFQFHNLLYAYGRNCSYICYRVKTWKHRSPVSFDWGVFHNQVYAGTHCHSERRFLSWFCAKKLRPDECYHITWFMSWSPCMKCAELVAGFLGMYQNVTLSIFTARLYYFQKPQYRKGLLRLSDQGACVDIMSYQEFKYCWKKFVYSQRRPFRPWKKLKRNYQLLAAELEDILG

SEQ ID NO: 110 - protein, 541 aa, synthetic construct
  REGION 1..541: note = pYY-BEM4.1; tr|A0A182D0J1|A0A182D0J1_BLAVI polypeptide sequence
MTNPESPPQAPCDFNEDALLNREPLRGSPIKFVSPVDYPDLVFALAGPVGVDIDYIQQSISDCLKSFDYSTEFIRITEIMQDIKCSKTIDCTDMLKEYQSKIEYANELRRAYRAKDLLAALTISAISKLREQIKERDEATNKSNIQPSRRKLAWVVRQLKTPEEVRLLRAVYGKQFVLVSIYSSPQRREDFLISKIKIKSRGTIDNNTSSEGAQRLIERDSKEDNEYGQNLSGTFCLGDIFVDSNNKESAIVSIDRFLNAFFGSNEISPTRDEYGMYLAKTASLRSCDLSRQVGAAIFSKTGEIISLGSNEVPKAGGGTYWTGDNADSRDIRLGHDPNEINKVEIFAEIISRLLEDKLLSNDLLNKDAASIVTILLSKNEGKRYKDLRVMDIIEFGRIIHAEMSAICDAARNGRAIIGATLFCTTFPCHLCAKHIVASGIGRIVYLEPYPKSYAKKLHSDSIQVEDHSDSEKVSFEPFIGISPSRYRELFEGGRRKDPFGEALKWKNDPRKPVIDVVVPPHFEAEKLVIAQLGKLIVSGTG

SEQ ID NO: 111 - protein, 330 aa, synthetic construct
  REGION 1..330: note = pYY-BEM4.2; tr|A0A2D6EXD2|A0A2D6EXD2_9ARCH polypeptide sequence
MIIGLVGTIGAGKQTIIDYLQEKYGYNALSCSDVLREILKKQGKPVTRDNLREIGNKTREEGGNGAIAKILLEKLRNNWKANYIVDSLRHPDEVSVLRTSPLFHLVAVDADLRIRFERVKARKREEEPTTLPAFVERDQKEMFGTGNEQRIRETMELADELVLNNGTVEELKQRIDDLNLVSDERLRPSWDDYFMRLARLAAQRSNCMSRKVGAIITKDRRVIATGYNGTPRGVKNCNEGGCERCNSAVAKGTAISECLCLHGEENAIIEAGRVRSEGATIYTSFLPCLWCTKMIIQAGLKEVVFSEVYDLHEASIKLFETSGVLIRRLK

SEQ ID NO: 112 - protein, 367 aa, synthetic construct
  REGION 1..367: note = pYY-BEM4.3; tr|F7YVM7|F7YVM7_9THEM polypeptide sequence
MNEFKYMSLALKLAKKGKYTTSPNPMVGAVIVKDGKILATGYHKKAGQPHAEINALSKLNFQAQNCEMYVTLEPCSHYGRTPPCADAIIRSGIRKVVIATLDPNPLVNGKGVEKLKNAGIEVVCGVLEEKAKKLNEKFFKYITTKIPFVALKIAQTLDGKIALKNGESKWITSEKSREYVHKLRMEYDAVLTGIGTILKDDPQLNVRLKKVYKQPLRIILDSKLKIPLSAKVLEDPSKVIILTTALADKEKLEELRSKGVEVIITNEKNGIVDLESALKILGEKKITSVMVEAGPTLLTSFLKESLFDKIYLFIAPKIFGADSKSVFSELGLEDISKSQKFSLESVKKIGEDLLLELYPKQLKKLEE

SEQ ID NO: 113 - protein, 449 aa, synthetic construct
  REGION 1..449: note = pYY-BEM4.4; tr|A0A3M6UNF1|A0A3M6UNF1_9CNID polypeptide sequence
MEEKSELENELMRSTSPKPSVPNGSKGNECEQRETRITKENLYMVLALWMEEFPVVEQTSSAKRLNKVGVVFVLPTDRVLAADCSRDGVHGVARVMVNHCGKLEGCKVFVSRKPCSLCAKLLVQSKVSRVFYLPIEPESENKGEIARADNLFKNSSVGQSVFVPCVEQKVLDKLEDKLPKEIITPDDISECRDNLLKKCGWSAEWFARAQASLPWPCFEGKMKSQVDNDFKSLIKWIAVVKAPMDKGVAFPKVKLTSDSRVVPDCDADNFPDSKTAYHMMIFAKMLARQTDDPKTGVGAVIVRGKVPDIVSLGWNGFPSKALYGEFPRASDDDRALQKKFPYVIHAEQNALMVRNVKDLTDGILFVTKPPCDECAPMIKLSGVKTIVIGEKIEKSRGGELSYNLIKEYIKEGIMTCYQMEATKTKAKRLASDPETRKRLKSSCSNSNDV

SEQ ID NO: 114 - protein, 414 aa, synthetic construct
  REGION 1..414: note = pYY-BEM4.5; tr|A0A2G3K826|A0A2G3K826_9BURK polypeptide sequence
MTKIIDDVNTAAAAVLDQATAAANQTTFAVGGVMVNNQTGEVISAIHNNVIIPLSNNVSFTFDPTAHGERQLVYWYYANKEALKLPEPNQITVITSLDPCAMCTGALLTAGFNVGVVAIDTYAGINCAQNFQFATLPANLRTKAQKNFGYYASGAANFKPLTRSYVGGPSVAFKNGVVTPANLRDCGTVFTQSVDTVRNTSNSTGLAPSQMSNPAELPSNSAILQAYRAIYKKAFTIKIDNPRLPDAQILTELKAVLADAPNARNAVAFIDPFGNLVLCMADAFNTSPVHAAFMNVTQEYAKTRWDLMNKYAQASTTDNPALYLTHPKYGTFVYLYAPDPDDSITIMSLGAYGSTMEGPIPNMFPSNLQFYYPPRNGAQFSELVPVVNELPPFYTQNVNISLMQVPGVTQAPTK

SEQ ID NO: 115 - protein, 308 aa, synthetic construct
  REGION 1..308: note = pYY-BEM4.6; tr|K1ZCJ4|K1ZCJ4_9BACT polypeptide sequence
MSSRAKKNRSTNLKKSIGQKSIENKPTDQKKDQVLVAYVPVIHEGYRRFFRHFPAVKELWLISQELSHELRSLQKDIRALKASETKKLLQTWGQFQKIKLLTPSSLAILQKTTTQLVFPDEEISHHLVEKYFAQNRVLFASFFLRWDKKSSLKKHDLQEYSEISNKEFDQMMIAIAQQEADKSDDWWRQVGGLIFKDETILLLAHNQHTPTEAEAYFAGDPRADFHQGEYLKISTAIHAEAYLIAQAAKQGISLEGADLYVTTFPCPVCAKQVAYSGIKRVFFREGYSLLDGETILKANGVKLIRVTV

SEQ ID NO: 116 - protein, 615 aa, synthetic construct
  REGION 1..615: note = pYY-BEM4.7; tr|A0A1G3PNQ8|A0A1G3PNQ8_9SPIR polypeptide sequence
MRDLPLLVLGLTGPMGAGCTRFARDISKMEPGKVIKKQGLLDQVAHEISELSKKASEIRLQCISNGKNSELAELKRLNRRLNAKLAERACLHVIAKSSLPEPLFISLNTIVIKIAVDSITAPEFAEWAKNHAKVADLLKWLRTQWESELTLYETWGQDAGRFSQDELEKMDAMFAEFERIGDEILKEDFETYFGKRNNDFSIRMFSENIRLSGNPFRPAENGGGGGKYDEPSMVMIARETDRYIRFYRTRSDQKRSHFFIIDEIKNPREAEYFRARHQNFFLVSIFSSSEIRASRMRRGLGHDAGVSDADFQHLFRELDSRDWGADDFDAHGLHRQNIYRCFNLADIAINNDVEDERFSEVLFNKFIRYYALMLSPGCVQPTPQETYMHLAYSLSLRSTCISRQVGAVITDLEDRILSLGWNEVPEGQIGCGLKVKKDYTDKENPLFEMEIWDNVITAEDLAVWDDEDSICVKDILSRIEIKTKLKSVSLTPEERADVLKALRIKRLEYSRSLHAEENAILQVASRGGVGLKDGTIYVTTFPCELCSKKIYQVGISKIYYTEPYPNSISEKVILKDGIRNIKILQFEGVKSYSYFKLFKPGFDKKDAQMLEGRGI

SEQ ID NO: 117 - protein, 291 aa, synthetic construct
  REGION 1..291: note = pYY-BEM4.8; tr|A0A1G0PGF4|A0A1G0PGF4_9BACT polypeptide sequence
MKHNNQLRKEIEKLLGQNSIIKNDELKKLQKEYKIETDELLISFLPYAAEFAKVPISKYKVGAVVLGKSGNIYFGSNMEFEAGALSATVHAEQSAVNNAWLNGETGINKIAVTAAPCGYCRQFLNELTTAKQLHVLLKDKNLEAAKVFKLTELLPEAFGPRDLEIEGGLMKVENHKLKIENINDELINAALEAANKSYAPYSKNYSGVSIQLSDGTIFSGRYSENAAYNPSLLPFQSALAFMNMNTKKGSNNKIVDAVLVEAVSNISQKDAAGTLLNSISKTKLRYYKIKN

SEQ ID NO: 118 - protein, 398 aa, synthetic construct
  REGION 1..398: note = pYY-BEM4.9; tr|A0A0P4WGY5|A0A0P4WGY5_9EUCA polypeptide sequence
MEENSSATSQPKCASRTKQGGNDLSTDMSNLSVGETKRTDFLPWDDYFMAVAFLSAMRSKDPSSQVGACIVNADKKIVGIGYNGMPIGCSDDELPWNKESLDPLQTKYMYVCHAEMNAIMNKNSSDLAGCCVYVALFPCNECAKLVIQAGIREVVFFSDKHQQKPETVASKKMLNMAGVAYRQYTPSQSKIELNLSLKEQEKSEPTADITQSSERDQNSKRKDYLSWEEYFMAMAHLSALRSKDPITQVGACIVNSKKKIVGIGYNGMPLGCNDDLMPWGNSSSNKLETKYMYVCHAGVNAIMNKNSCDVSGCTLYVALFPCNECAKVIIQAGIKTIIYASDTNKDQASILASKKMLDMAGIKYRADNLSQRKIVIDFKTIDWNSRFMNDHQNDPTCL

SEQ ID NO: 119 - protein, 259 aa, synthetic construct
  REGION 1..259: note = pYY-BEM4.10; tr|A0A3D8IG27|A0A3D8IG27_9HELI polypeptide sequence
MRKNILYFILTLFFLSGLYATSLPEDNVVSGVIYEKIDTVSAEVDHIYPMLALAIVYKDWQEKNMLNKQGHNIGLVIVDENNMPVFWVRNSVHATHNGTQHGEVRLVSNLLNCEGFNKYLDKYTLYTTLEPCIMCAGMLSMVQIPKVVYAQKDLSCGNTQEIISTAKYPRYYKAFTVENGYKKDLEECFEQYKICKNDSITDFLVNDSAKEIFRKASNDLQDYKVKFKENRRVIKVAQEFLQNIQTKDNLDVLQCPKNM

SEQ ID NO: 120 - protein, 256 aa, synthetic construct
  REGION 1..256: note = pYY-BEM4.11; tr|A0A351C8C4|A0A351C8C4_9BACT polypeptide sequence
MNELTKQSEHLRNEALRIATRSYVPYTGQQEGVIILLENGDLIPGVRVENASFQLTIPALQNALSTMYALQRTDISMIVSSIPFTDSDLAYTGGMAEIAWEMVGASLLLVAGAHIPEAGTFIDPARGENLLDVSREAALNAFIPESDFPVGSAIQTSDDVVIDGCNVEHSDWSKIICAERNVLSTARSYGLGQITTIYVSCPKEPGGTPCGACRQVIVELAPDATVWMDRGNQEPIAMKATKLLPGHFTGNVLKKQ

SEQ ID NO: 121 - protein, 301 aa, synthetic construct
  REGION 1..301: note = pYY-BEM4.12; tr|A0A1G6V2K7|A0A1G6V2K7_PEPNI polypeptide sequence
MPIVRVNEIGARLPEDWEALETAIWQAYVSREDLPDAGELDLTLVDDATIQELNKTHRQLDKSTDVLSFPMYDDRDDLAADVQAGLPVILGDIMISVPTAERQAQAYGHSFKREMAYLLVHGLLHIAGYDHMSAEEKSAMRRAEEAILADVDVPRDTAPSKTAAVLDEADVQALIDAARAARLQAYAPYSGYAVGAALLAADGRRFCGVNVENASYGATCCAERTALFAAVTAGARDFIALALVTEGDEPAPPCGLCRQALAEFSPDLAIYLAGPTGETYRRTSLAALFPEAFSLSTKESV

SEQ ID NO: 122 - protein, 528 aa, synthetic construct
  REGION 1..528: note = pYY-BEM4.13; tr|F2NP91|F2NP91_MARHT polypeptide sequence
MPVMETHALEARFKEALARLCPEGRLLAAVSGGGDSVALLYLLKAAGRDTIVAHLDHALRPDSAADAAFVEKLAQRLGFPLETEHVDVRALAHRKRINLEAAAREVRYAFLARVARRWKARCILTAHTLDDNAETVLLQILRGAGRGLGIRPLQRRVARPLLEFSRAELRAYLEARGARWLEDPTNRSLELDRNYLRHAVLPRITARFPHALEALARFSQAQQADDWALEALSARHLIPDRRWPVPAYRALPLERAPEALRRRAIRGVLEALGVRPEARLVADVEAALGGRAQTLPGGVVVRRQRGTLFFIPPTVRFPKVQPPAGLEARPPRPGDYLVFPYGRKRLVDFLNERGVPRELKRRWPVGAVGAEVRWVYGLWPEPDEDRYMRRALVLARAAARQGEVPIGAVLVRDGAVLAEAANAVEASRDATAHAELLALRTALRRVGEKVLPGATLYVTLEPCPMCYGAILEARVARVVYGVENLKAGAFTVHGLEPRVALEAGRVEGECAKVLKDFFARLRPGRDGA

SEQ ID NO: 123 - protein, 226 aa, synthetic construct
  REGION 1..226: note = pYY-BEM4.14; tr|A0A316TX77|A0A316TX77_9BACT polypeptide sequence
MINGYTPYSGNQNTCYVKGESGTFYPGVRIENVSYPLTISSVQAAVCSCLANSDNPVEYYTGDHQPELLQVWADEYDMKPGGKLPDSPLKLFDPLVPSIPDIKKELDVLTEKSVTPNSGFPVSALLQTEKGYIRGVNIELSSWALGLCAERVAISRALTAGYTQFKSIHIYAPEADFVSPCGACRQVLLEVMPDADTELYHGDGTLSKHIVSDLLPFGFTSHKLKK

SEQ ID NO: 124 - protein, 321 aa, synthetic construct
  REGION 1..321: note = pYY-BEM4.15; tr|R6VYG3|R6VYG3_9FIRM polypeptide sequence
MIHKGTQTIETKRLILRAFTPDDAEAAFENWMSDPKVTEFLRWKTHADISDSRKIVNEWANGSADPEFYQWAIVPKDVNEPIGTISVVDRNDALGIFHIGYCIGSKWWHKGITSEAFSAVIHFLFEEVGANRIESQHDPENIHSGDVMKKCGLTFEGTLRQADFNNRGIVDACVYSILQSEWQNNTSVWQRLYNAALTVQNDRVVSPFIDAGGVAAALMTKKGNIYTGICIDTASTLGMCAERNAVANMLTNGESRIDKIVAVMPDGKVGAPCGACREYMMQLDRDSGDIEILLDLETEKTVRLKDLIPDWWGAERFGDTE

SEQ ID NO: 125 - protein, 229 aa, synthetic construct
  REGION 1..229: note = pYY-BEM4.16; tr|A0A3C1HZ18|A0A3C1HZ18_9BACI polypeptide sequence
MGDIMENWNELSEPWKRCFLQAWKAYCHGSIPIGAVLVDSEGEIFLEGRNRVHELTAPEGQLCDCRIAHAEMNVLVQVKTSDYEKLSGATIYSTMEPCIQCFGAIILSRIKNISFAAIDDKLAGATTLEDRHGFIKSRNLNIAGPFSHLGEIQIILRTDFLLRIFDSEYADPLIAAHEKDYPIGVALGRHYHRNNRLQVAKKETIPFGELFNEFSFDIKRAREGYTLGK

SEQ ID NO: 126 - protein, 205 aa, synthetic construct
  REGION 1..205: note = pYY-BEM4.17; tr|A0A1M6KV24|A0A1M6KV24_9BACT polypeptide sequence
MEASQQNILLKIEGKGPVAEINFTVTLPEWLVEQVQSGSTVFLTQKEKMRFVLELARKNVAQETGGPFAAAVFSLESGELVSAGVNVVVESRCSSAHAEVVALSLAQKAVDSHDLGAAGLPRMVLVSSAEPCAMCMGAIPWSGVKQVICGARDEDVRSVGFDEGAKPLEWVEDFAERGIEVIRDVLREEATEVLWDYRERGGEIY

SEQ ID NO: 127 - protein, 207 aa, synthetic construct
  REGION 1..207: note = pYY-BEM4.18; tr|A0A2U0T9B4|A0A2U0T9B4_9RHIZ polypeptide sequence
METAELISRLLDVIEKDIAPVTAKGVARGNKLFGAAILKKSDLAVIVAETNNEIENPLWHGEMQAIKRFFELPADQRPATRDCLFLATHEPCSLCLSGITWSGFDNFYYLFSHQDSRDGFAIPYDIQILKSVYAVPEPETGTVSPARDLYNRSNDFWTSHGLQDMIAGLARSNREALLARIDDLNALYAELSERYQRDKGGKGIPLP

SEQ ID NO: 128 - protein, 231 aa, synthetic construct
  REGION 1..231: note = pYY-BEM4.19; tr|A0A2K9PN08|A0A2K9PN08_9FLAO polypeptide sequence
MSDKKESKIKISKTSESIELDEIHSLLSYSIVQKFWENDDRNGRGYNVGVILVDENKNIVDWDINSVNKTENSTQHGEMRLISRYLDKDELYSLKGYTMYPTLEPCAMCAGMMTMTNVYRTVNGQMDYFYSKALERLSIDTRECGGYPPYPRTVISEISPSSISTRLDAEYKQYTNAGNKPIITKFLSTYKAKTIYDDAFNQFINFKCKFPENKTKYENAIKFYNSLPESI

SEQ ID NO: 129 - protein, 330 aa, synthetic construct
  REGION 1..330: note = pYY-BEM4.20; tr|F4PWM7|F4PWM7_CAVFA polypeptide sequence
MRFSLSLLFVILSVLLAGVLACKDPYNPETVDYGQCASATKANYEVRSDSKVLTPADLPADELAVHESRMRHIIDIARVNNKKFVSSIYFPNGTLACIGINTGKPNMIAHGEIVAIQNCTEIHGISMYTNYSIYTTGEPCSMCASAILWSRFKTVVWSTYNSDLYCKICMSNIPIDSSYIFSRAYGLGIEAPVAIGGVVKAEGDAWFGTYCNRPTSIYYIAPKCACQDPAKVSPLKFTQTRTTVWVEGGDKVVTQWNAIISNPSNSTIVDPPIVISPSVVFKGAPWGISAASEPNTYKLSYNKVLFPGQTFSFGYSVYGLEEVAFTALEA

SEQ ID NO: 130 - protein, 193 aa, synthetic construct
  REGION 1..193: note = pYY-BEM4.21; tr|U7QZM1|U7QZM1_PHOTE polypeptide sequence
MNKTRRKLLATLGIMSISMSFIAQAGEKKTQVINNILSKQEITEHEKYMREAIKEAIKNPKHPFGAVIVNRNNGEILSRGVNTGRNNPILHGEIQAINHYITQYGNQGWENVALYTTGEPCSMCMSALVWIGIREVIWATSISVIRNSGIRQIDISAHEIAERASSFYNPITLVGGILANETDKLFLERKRGN

SEQ ID NO: 131 - protein, 319 aa, synthetic construct
  REGION 1..319: note = pYY-BEM4.22; tr|A0A081CH48|A0A081CH48_PSEA2 polypeptide sequence
MASRRHLLATQVTGNHRKLSLWHLRGWLSPYTKLVDAVYFLTTNSFYHSLQTPPVQSITMLLSSIITSLALAAQASAYREGLHPEFQSGLSINSVPATDRDHWMRLANSAIYYPPVSHPCPQAPFGTAIVNTTSNELICAIANRVGSTGDPTQHGEITAIQHCTNVMRKKGLSPQEIIAAWKQLSLYTNAEPCTMCLSAIRWAGFKEVIYGTSVGTISENGRNQIYIPSNLVLEKSYSFGHATLMLGNILTHETDPFFQHQFNESAPCPVGCERTQVGEARVKTCEPVPNWQKLVRLEYSEDSRVGSEPVAHTPLHLEL

SEQ ID NO: 132 - protein, 203 aa, synthetic construct
  REGION 1..203: note = pYY-BEM4.23; tr|A0A3D3HMU1|A0A3D3HMU1_9GAMM polypeptide sequence
MDYSDAILGAITSIRRNSKQPGVNVTDNVTDSSTQYNNDEYWMRRALALAREAGEAGEIPVGAVLVKDNQQVAGGFNQPIRSHDPAAHAEILTLREAGAVLGNYRLIDTTLYVTLEPCMMCAGALVHSRIKRLVFGAAEPKTGAAGSFIDLLTLPRLNHYMEVTGGVLGEECSVLLSDFFRRRRAEKKALKRQNSESGSDSAS

SEQ ID NO: 133 - protein, 270 aa, synthetic construct
  REGION 1..270: note = pYY-BEM4.24; tr|A0A1N5WT13|A0A1N5WT13_9ACTN polypeptide sequence
MLEKIERRLVAAAEAVVRSPSTGDAHTVAAAAMDANGDIYSGVNVFHFTGGPCAELVVIGSAAAANAPPLITIVAVGDGDRGVIAPCGRCRQVMLDLHPDVFVIVPTGDGQLAAKPVRELLPFGYVARTGSTAPRVVYFHPRHYDTISSGLKTATVRFQDSVQTGPAVFVFDDGESIRRLDAVVEKVESRRLDHLTEEDAHHEALPDSDALRDAIKTQYPMLGDGDVVDVATFRLTAISAPDPDPRSSYPPAVSRCNPAGPRADLLVGQS

SEQ ID NO: 134 - protein, 257 aa, synthetic construct
  REGION 1..257: note = pYY-BEM4.25; tr|X0SAC5|X0SAC5_9ZZZZ polypeptide sequence
MTKDGRVIASAHDTEVTDQDSTAHAEINAIRKASKIYRKDLTGCLIISTHEPCPMCTGSIIWSNISKVVYGVSIRDSIKAGRDMINLSCKEIIKKPNAEINIYDGILKKECLKLYNNDTRKLVKKFRKYEWINIEENLLNKRMQWFENNKTMIRKLKGNDLEKAYHLILMKIGIKRSEAPIVKKSESKIIFHSKNYCPSLEACIILDLDTREVCKEIYERPTEELIRRLNSKLRFTRNYDCIRPYSDYCEEIIILEK

SEQ ID NO: 135 - protein, 154 aa, synthetic construct
  REGION 1..154: note = pYY-BEM4.26; tr|A0A3B8IC10|A0A3B8IC10_9BACT polypeptide sequence
MPSHEDFIHQCLELGKEALLQGNPPVGSVIVWQDQVIGRGIENGRSSGDITQHAELLALQEAVATGQRDKLKEAIIYSTHEPCVMCAYPIRQYKIPTVVYSVAVPELGGHTSSWHLLTTEDVPKWGKAPKIITGISAEEVEALNAAFQDSLKKG

SEQ ID NO: 136 - protein, 180 aa, synthetic construct
  REGION 1..180: note = pYY-BEM4.27; tr|A0A2N9P8B9|A0A2N9P8B9_9FLAO polypeptide sequence
MFIFKLISPPVSIEVYQDKIIQKLYICFMENIFTDEYFMKKALQEAETAFQQGEIPVGAVIVIDNRIIARSHNLTEMLNDVTAHAEMQAITASANFLGGKYLKDCTLYVTLEPCQMCAGALYWSQISKIVYGATDEQRGYRAMGAQLHPKTKVISGIMQNECTHLMKDFFKQRRSKSTKD

SEQ ID NO: 137 - protein, 178 aa, synthetic construct
  REGION 1..178: note = pYY-BEM4.28; tr|K1KX30|K1KX30_9BACT polypeptide sequence
MVKNPVNNNELYFGKHSEIPMNEEQKAYMKMAVDLSRSGMESGKGGPFGCVIVKDGKVIGIGSNSVLETNDPTAHAEIVAIRDACRNLGHFQLDGCEVYTSCEPCPMCLGAIYWARPSKVFFANDKRDAAEAGFDDDFIYQELELPYEKRKIPFEQGMQDTAKEVFQEWILKEDKTLY

SEQ ID NO: 138 - protein, 196 aa, synthetic construct
  REGION 1..196: note = pYY-BEM4.29; tr|R4XI84|R4XI84_TAPDE polypeptide sequence
MSSEIEPPSTDVHKHAVAEAADESGAADAFMQIALQQAETALLNKEVPVGCVFVHQPTGTVLATGANQTNASLNGTLHAEFVAIESILRDHPPSIFRESDLYVTVEPCVMCASALRQLQVRKVYFGCGNDRFGGCGSVFSIHSDASKTGDAAYMVESGIFRKEAIMLLRRFYLLQNESAPKPALKSTRVLKEHFDE

SEQ ID NO: 139 - protein, 212 aa, synthetic construct
  REGION 1..212: note = pYY-BEM4.30; tr|A0A239CVF7|A0A239CVF7_9DELT polypeptide sequence
MSPASKKHFPSLFSFLLLTIGLICGTAHAQPQGHTADDTAATLANASLKEHEPFIRRCYQLAIDAGKKGNHPFGALLVHKGKIVLEAENTVLTDNDFTNHAEMNLIAEAARTLSRQIIPEATVYTSCAPCAMCTATLAMAGFTRIVYGVSHDALNKRFGLKGKSVSCPALFKTMGMELEFVGPVLEKEGLRVFDFWPEKDPHAQMLKKQARK

SEQ ID NO: 140 - protein, 320 aa, synthetic construct
  REGION 1..320: note = pYY-BEM4.31; tr|A0A1Q3NME1|A0A1Q3NME1_9BACT polypeptide sequence
MTEFNYDWAKLAFSSKRPLTNLKATFIIAPREISEKRFTQLLKEYLPKGDILLGISKEDYVEGLEGQPQFAMLQQKTLQKLIDKVNDASAHKVYTLRYFQRELPAIIEKLTPPRVVGIHGSWHHSFHTLPIYYLLSEKRIPYQLVAAFSDEDEARAYEVATDKKIVRPTLEGSFDDTTVLQLTDEVAKSSYDYGFQTGAILAEKVNGVYQPVAAGFNKVVPYQTYALLNGASRETNFSPANDMNHYDTIHAEMQILVEAAKQGISLKDKTLFVNLMPCPSCARTLSQTELSEIVYRIDHSGGYAVDLLTKVGKDIRRIVY

SEQ ID NO: 141 - protein, 180 aa, synthetic construct
  REGION 1..180: note = pYY-BEM4.32; tr|A0A2G6N4N7|A0A2G6N4N7_9DELT polypeptide sequence
MKERTVSYSDRHFMAEALEMAESALTQGEFPVGCVIADGTAVVARGHRTGTTAGAVNEIDHAEINALRHLGLAGEHLDRTDLTIYSTMEPCLMCFAAIVLSGINRIVYAYEDVMGGGTGCDLTGLPPLYRDAPLTLVAGVRRRASLNLFRRFFTDPENGYWAGSLLSRYTLNQTKDSHRL

SEQ ID NO: 142 - protein, 156 aa, synthetic construct
  REGION 1..156: note = pYY-BEM4.33; tr|A0A0G0RBB8|A0A0G0RBB8_9BACT polypeptide sequence
MQSVQYNKLTHLQRRALDEAEQVLENSYNPYSHFYVGACLISEDEQLIAGTNFENAAYGSAICAERAAVLRANAMSIRRFRGIAIIARGEDFNTTEVTGPCGSCRQVLYEISQVSGCDLQVILATSKKDKIVITTIRELLPLAFGPLDLGVDIGKY

SEQ ID NO: 143 - protein, 217 aa, synthetic construct
  REGION 1..217: note = pYY-BEM4.34; tr|A0A327L2Q5|A0A327L2Q5_9RHIZ polypeptide sequence
MVTSRDGEDEAMMARCVALSRIAVGKGEYPFGAVVAREGRIVAEAINRTIRDGDVSRHAEVIALARAQKAIGRRELRECSLYSNVEPCAMCSYCIREAWVGRVVYALGSPVMGGVSKWNILRDDGLSGRMPQVFDAAPEVVSGVLVEQAQAAWRDWSPLAWEMITLRGLMTDPSARPECRTRAARPRSLWHHLVALIERPPRPYVDPTSAAEGHADL

SEQ ID NO: 144 - protein, 162 aa, synthetic construct
  REGION 1..162: note = pYY-BEM4.35; tr|S2DR30|S2DR30_9BACT polypeptide sequence
MKMKKKIEITVSLEVIQKSEWSKEDRSLIERAIHAVEHAHAPYSNFMVGTALLLDNGQIFSANNQENVSFPVGICAERAVLSYAMGNFPNNRPVKLAVVAKRRSDSTWATVTPCGLCRQTINEYEVKFGHPIEILMLNPGEEILKASGIDQLLPFRFNDLNS

SEQ ID NO: 145 - protein, 153 aa, synthetic construct
  REGION 1..153: note = pYY-BEM4.36; tr|A0A369QGF1|A0A369QGF1_9BACT polypeptide sequence
MEEHEKWMHWCLNLAQQALQQGDFPVGAVVVQKGKLIGQGVEAGQLKKDITCHAEMEAIRDARQTINTADLQNCILYSTHEPCIMCSYVIRHHKISRVVVGTTVPEVGGSSSAYPLLSAPDISIWVAPPHLVTGVLAEACQALSQAYKQKFKK

SEQ ID NO: 146 - protein, 159 aa, synthetic construct
  REGION 1..159: note = pYY-BEM4.37; tr|A0A1W6X4U4|A0A1W6X4U4_9RHIZ polypeptide sequence
MTNPSRQERWDRRFLELAKVFGTWSKDRSAGTGCVIVGPDRLLRASGYNGFARGIDDEVPERHERPAKYSWTEHAERNAIYNAAKLGISLDGCTAYVNWFPCIDCARAIVQAGIVRLVGLHPDHADQRWGSEFKFATEMLRESGIEIILYDIPELAARK

SEQ ID NO: 147 - protein, 490 aa, synthetic construct
  REGION 1..490: note = pYY-BEM4.38; tr|A0A238BW09|A0A238BW09_9BILA polypeptide sequence
MEEMARKIRTKAKKANSYCNTMTFLISKASIVLLKAECKRIELTVVIFRFLIKMNASEPNNELCDMTVIKSMLKITHVIFDLDGLLIDTEVVFSKVNQCLLSKYNKKFTPHLRGLVTGMPKKAAVTYILEHEKLSAKVDVDEYCKKYDEMAEEMLPKCSLMPGVMKLVRHLKTHSIPMAICTGATKKEFEIKTRYHKELLDLISLRVLSGDDPAVKRGKPAPDPFLVTMDRFKQKPEKAENVLVFEDAANGVCAAIAAGMNVIMVPDLTYMKIPEGLQNKINSFSDNLIISNDLNVALMSLKKELSEEEVHFLNRAFEIAVDAVLNNEVPVGCVFVFEGQEVAFGRNDVNRTKNPTYHAEMVALKMMKQWCMDNGRDLEEIMRRTTLYVTLEPCIMCASALYHLRLKKILYGAANERFGGLVSVGTREKYGAKHFIEIMPNLSVDRAVKLLKEFYEKQNPFCPEEKRKVKKPKKSGNNNDNSDDAVALNV

SEQ ID NO: 148 - protein, 159 aa, synthetic construct
  REGION 1..159: note = pYY-BEM4.39; tr|A0A1J5H6Z0|A0A1J5H6Z0_9BACT polypeptide sequence
MAYQPSEKFMQMAIDKTREGVLSGQTPFGACIVKDGKVVACEHNTVWQDTDITSHGEVHTIRAACKAIGSIDLSGCILYSTCEPCPMCFSAIHWARIDTVVYGAFIADAQDAGFNELTISNEKMKEFGGSPVNFISGFMRDENVALFKLWKEQGANNVY

SEQ ID NO: 149 - protein, 168 aa, synthetic construct
  REGION 1..168: note = pYY-BEM4.40; tr|A0A3C2D945|A0A3C2D945_9BACT polypeptide sequence
MKTTEIRIIVHEYQNIDELTENDQYLLHEARRITEFAYAPYSGFHVGAAILLGNGMIVKGNNQENSAYPSGLCAERVALFYANANYPDSEVKTIAISAAKNGILVNDPIKPCGGCRQTLSEAEVRFGSPIRIILDGQDSILVLHGVESLLPLSFSKKDLASPLAATGR

SEQ ID NO: 150 - protein, 214 aa, synthetic construct
  REGION 1..214: note = pYY-BEM4.41; tr|A0A1I7EYS3|A0A1I7EYS3_9BURK polypeptide sequence
MKFKLDPSRPPDEDDYYLGVALAVRRKANCTGNRVAAVIVKNKRVIATGYNGVPEDMPNCLDGGCLRCSNPGGQFKSGTRYDLCICVHAEQNALLTAARFGISVEGAHLYTTMQPCFGCAKEILQAKIEKVFYLHPWVPTDVDPVMDAAMKAEYAKIIGKLKVKKLDFDDPVATWAVTTMRQAALASDKNPDKKTPPKTAKKKVAKKKSRTSPR

SEQ ID NO: 151 - protein, 155 aa, synthetic construct
  REGION 1..155: note = pYY-BEM4.42; tr|H8GQX8|H8GQX8_METAL polypeptide sequence
MNHEHFMRRAIELARQAPQYPFGAVIVRRDDGQCVGQGFNRSDLNPTYHGEMVAINDCAVRHCAEDWRGFDLYTTAEPCAMCQGAIEWAGIGRVFYGTSIPYLQKLGWWQIDLRAAEVSARAVFRDTLIVGGILETECNALFAAARRGCFGTGSE

SEQ ID NO: 152 - protein, 156 aa, synthetic construct
  REGION 1..156: note = pYY-BEM4.43; tr|A0A0S8HZN3|A0A0S8HZN3_9CHLR polypeptide sequence
MDEHDIRFLRASFDVARNARKNGNHPFGALLVDEHGRIVMEAENTVITAKDCTGHAETNLMREASSKYDSDFLANCTIYTSTEPCPMCAGAIFWSNVRRVVYGLSEESLYEIAGRGSEEVLFLSCREIFERGKKLIEVIGPLLEDEAREVHMGFWR

SEQ ID NO: 153 - protein, 193 aa, synthetic construct
  REGION 1..193: note = pYY-BEM4.44; tr|E3SF31|E3SF31_9CAUD polypeptide sequence
MKPTTVLQIAYLVSQESKCCSWKVGAVIEKNGRIISTGYNGSPAGGVNCCEHAEEQGWLLNKPKPVLIPGHKSECVRFSQVDRFVLAKAHREAHSAWSKNNEIHAELNAILFAARMGSSIEGATMYVTLSPCPDCAKAISQSGIKKLVYCETYDKNIPGWDDILKNAGIEVFNVPKRSLDKLNWENINEFCGE

SEQ ID NO: 154 - protein, 330 aa, synthetic construct
  REGION 1..330: note = pYY-BEM4.45; tr|F8AAC6|F8AAC6_THEID polypeptide sequence
MIRAPWHEYFMLLAKIVALRSGCNSRPSGAVIVKNKRILATGYNGPMPGAWHCTDRGPGYCFRREKGIPDIDKYNFCRATHAEANAIAQAARFGISVEGASLYCTLAPCYVCLKLIASAGIKKVYYEHDYGSRDFERDQFWKEAIKEAGLEKFEQITVSQEVMEQLQEILPYPTSKRRLAPTEFLDEFEDGKKYGVPSIEVLFNKLNYLTRQALKDITFVIEKTTVTEEPEGISFYLSGKMVELSELINTVKKQINADQNFYFLAKHNAIEAKIEILREAENIRLKAFLNECPLESFKRIAESLDYILYQVSNSLSLPTRLELSVNLLRI

SEQ ID NO: 155 - protein, 158 aa, synthetic construct
  REGION 1..158: note = pYY-BEM4.46; tr|A0A2H4ZNK4|A0A2H4ZNK4_9EUKA polypeptide sequence
MKKQLSRKIQEEWMSRLLRNAYDAGTYGEVPIAAVILNESGQCIGWGRNCREKDQNPLGHAEIIALRQASYLKKSWRFNECTMLVTLEPCPMCAGALLQARINHIIYGASDYKRGGFGGVLDLSKNSSAHHKIEITRGVKSIQSCQLLETWFRRRRRV

SEQ ID NO: 156 - protein, 176 aa, synthetic construct
  REGION 1..176: note = pYY-BEM4.47; tr|A0A239N5N1|A0A239N5N1_9PSED polypeptide sequence
MEGRAGIIPFDEGGAAMGPAEEDSPMQHLAYMREALALARANVEAGGRPFGAVLVRDGEVIARAANGTHLDHDPTAHAELLALRAAGRALGSPRLDGCVVYASGHPCPMCLAAMHLSGVSAAYYAYSNADGEPYGLSTAAVYAQMAQPVEWQSLPLQALRPEDEEGLYGFWRERRP

SEQ ID NO: 157 - protein, 199 aa, synthetic construct
  REGION 1..199: note = pYY-BEM4.48; tr|A0A328VTR2|A0A328VTR2_9PSED polypeptide sequence
MHPEHLALLQQAPASTHADDTWARLCCEQALLAVEEGCYAVGALLVDGAGELLCSGRNQVFAPAYASAAHAEMRVLDQLEAEHAQVDRRSLTLYVSLEPCLMCYGRILLAGITRVRYLARDRDGGFALRHGRLPPAWANLASGLSVVQAKADPYWLDLAEHAIGRLQDRQTLRQRVIRAWRGQRTLTDEFSSTKRTHSG

SEQ ID NO: 158 - protein, 402 aa, synthetic construct
  REGION 1..402: note = pYY-BEM4.49; tr|A0A103YG48|A0A103YG48_CYNCS polypeptide sequence
YIRELHASSLRRDEHEIQNPKILVIVDRLSSPSLHVSLSLSLSLVIFPPFIPLNQTPTHMENAKVVEAKDGTIAVASAFSGHQEVVQDRDHKFLTRAVEEAYKGVECGDGGPFGAVVVHKDEVVASCHNMVLKHTDPTAHAEVTAIREACKKLNKIELSDCEIYASCEPCPMCFGAIHLSRIKRLIYGAKAEAAIAIGFDDFIADALRGTGFYQKAHLEIKQADGNGAMIAEQVFEKTKAKFAIDHKFLTRAVEEAYKGVECGDGRPFGALVVHKDEVVVSCHNMVLNYTDPTAHAEITAIREACKKLNRIELSDCEMYSSCEPCPMCFGAIQISRIKRLVYGAKAEASIASGIPIGDFISDALKGTGFHEKANFEIKQADGNGAMIAEQVFERTKAMFPKR

SEQ ID NO: 159 - protein, 195 aa, synthetic construct
  REGION 1..195: note = pYY-BEM4.50; tr|W5M1M8|W5M1M8_LEPOC polypeptide sequence
NSSTRESRVMAQMEINGGASPPKKPGKGQSAADQDMITGLINKALQAKEFAYCPYSNFRVGAALMTNDGRVFTGCNVENACYNLGVCAERTAILKAVSEGYESFRAIAVSSDLQDQFISPCGACRQVMREFGTGWDVFLTKVDGSYVRMTVDELLPMSFGPDDLKKKKVFSLQNGHEVSTQFYTHSPCEAGENNN

SEQ ID NO: 160 - protein, 134 aa, synthetic construct
  REGION 1..134: note = pYY-BEM4.51; tr|A0A3N5YPZ2|A0A3N5YPZ2_9ALTE polypeptide sequence
MSNSETEHIQALVDAAQAAQKQSYSPYSSFQVGAAIFADDGNTYSGCNIENVAYPLGQCAEATAIGMMIMQGAKRIEDIMIASPNDQVCPPCGGCRQKISEFGTAETKIHMVTRSGEVSTVTLGELLPLAFDSL

SEQ ID NO: 161 - protein, 162 aa, synthetic construct
  REGION 1..162: note = pYY-BEM4.52; tr|A0A2A9NC86|A0A2A9NC86_9AGAR polypeptide sequence
MTNSTLSNEDRTRLIQGAFQARKKTYSPYSNFPVGAALLTTDGRIIEGANIENASYGGTICAERTAIVKAVSDGYRHFAGIAVTTKMPTRVSPCGICRQVLREFCSLDMPVLLVPGDYPQRNPVDDDGADKPGVITEGGVRETTLGALLPDSFGPENLPPRA

SEQ ID NO: 162 - protein, 163 aa, synthetic construct
  REGION 1..163: note = pYY-BEM4.53; tr|A0A2D6RD43|A0A2D6RD43_9GAMM polypeptide sequence
MNIENLITENDETLIRRCIELAGESVKNGDKPFGALLAKDGNIIFESSNNAKTKVPYHAEILTLMDAQDKLNTTDLSDYALYSNCEPCPMCSFMIREYKLDKVVFSVHSPYMGGQSRWNILEDDVLTRFKPYFSKPPNVVGGVLESEGKRIFDKVGLWMFGKE

SEQ ID NO: 163 - protein, 204 aa, synthetic construct
  REGION 1..204: note = pYY-BEM4.54; tr|A0A0H3AVL6|A0A0H3AVL6_BRUO2 polypeptide sequence
MHAKGYSQQERRIIPFANRFRFRELCSNKSLHGLRAKFPEQYTKWDPMRKAASITKANSATPMDIALEEAHAAGERGEVPIGAVIVRDGEIIARAGNRTREFNDVTAHAEILTIRQAGEMLGSERLIDCDLYVTLEPCAMCAAAISFARIRRLYYGASDPKGGGIEHGGRFYTQPTCHHAPEIYPGFCEADARKILKDFFREKR

SEQ ID NO: 164 - protein, 165 aa, synthetic construct
  REGION 1..165: note = pYY-BEM4.55; tr|A0A242H531|A0A242H531_9ENTE polypeptide sequence
MFIVKNNIEVIQQQAELDAKFMKQALKLAKDASNNGNEPFGAVLVKNDKVILTGENQIHTESDPTYHAELGIIRDFCTSQKITDLSEYTLYTSCEPCCMCAGAMVWSNLDRMVYGLGHDELAEIAGFNIMIGSEEIFSKSPNRPEVAKGVLKEAAVPVYVDYFQR

SEQ ID NO: 165 - protein, 181 aa, synthetic construct
  REGION 1..181: note = pYY-BEM4.56; tr|A0A2R6XZE2|A0A2R6XZE2_9BACL polypeptide sequence
MSGRISWHEYFMAQAKLIALRATCTRLMVGAVIVRDRRVIAGGYNGSIAGDEHCIDVGCKVRDGHCIRTIHAEQNALMQCAKFGVSTDGAELYVTHFPCLNCTKLLIQAGIRHIYYEVPYRVDPYAIELLEKAGVGTTQITVDLNAYVQVMSKVSTDPALTYVPESKAQKDEYGQSVGKIV

SEQ ID NO: 166 - protein, 173 aa, synthetic construct
  REGION 1..173: note = pYY-BEM4.57; tr|A0A139SHT6|A0A139SHT6_9BACT polypeptide sequence
MSEANASSESLPSRNSPVELIAEAAGKFGRRPTWDEYFMATAVLISTRSSCERLNVGCVIVTAGESHKNRIVAAGYNGHLPGSPHTSRMRDGHEQATVHAEQNAISDAARRGSSVEGCTAYVTHYPCINCAKILASAGIAKICYRLDYHNDPLVKPMLAEAGIEIVQLGEAAS

SEQ ID NO: 167 - protein, 170 aa, synthetic construct
  REGION 1..170: note = pYY-BEM4.58; tr|A0A261DBH2|A0A261DBH2_9RICK polypeptide sequence
MVMKKKLITVKRSTEFNNFFMEEALKQAQFALDKNEIPVGAIIVNRITNKVIAKAHNIVEQTKNPVLHAEIVAINQSCQILSSKNLSDCDMYVTLEPCVMCSGAISFARIGRLFYAANDPKQGAIENGGRFFNSKSCFYRPEIYSGFSAKISENLIKEFFYNVRYQKCNP

SEQ ID NO: 168 - protein, 146 aa, synthetic construct
  REGION 1..146: note = pYY-BEM4.59; tr|A0A2N0XZK6|A0A2N0XZK6_9VIBR polypeptide sequence
MTDNSLHESYMRQAFELSKSALPGCRPNPPVGCVFVKDGEVVSSGFSQPPGNHHAEAGAIAAYTGSYDGLVAYVTLEPCSFQGRTPSCAKALVRVRPEKVYVAILDPDTRNSGAGIKILEDAGIDVEVGLLGEEVASFLNPYLIRN

SEQ ID NO: 169 - protein, 159 aa, synthetic construct
  REGION 1..159: note = pYY-BEM4.60; tr|A0A1V5R0F9|A0A1V5R0F9_9BACT polypeptide sequence
MTKKETTKLHALDDFCMKKALLLAKRAFRADEVPVGALVVDSSNKVIGRGYNQVEKRKSQRAHAEQLAIEQACKKIGDWRLEGCTLYVTLEPCTMCMGLIKLSRIERVVFGAASPLFGYQLDKNRKSQLYKKGVIKIRKGVGKATAAALLKDFFKNKRM

SEQ ID NO: 170 - protein, 167 aa, synthetic construct
  REGION 1..167: note = pYY-BEM4.61; tr|A0A2W0H8Y3|A0A2W0H8Y3_9BACI polypeptide sequence
MKNNGRLDHEYFMTEALQEAKEAGQRGDLPIGAVIVHNGRIIARGSNMRKTAGIKISHAENNAMHNCAPYLMKHASECVIYTTLEPCIMCLTTLVMANIDSIVFAADDKYMNMKPFIDANSYIRDRIHQYKGGVCRGESEALLRKYSPYAAELALNGTHPHHRKGGA

SEQ ID NO: 171 - protein, 165 aa, synthetic construct
  REGION 1..165: note = pYY-BEM4.62; tr|A0A261BDB7|A0A261BDB7_CAERE polypeptide sequence
LYKLYIFRMTTTKANLTQFEQELVDKAVGAMEKAYCKYSGFKVGAALVCEDGEIIIGANHENASYGATICAERSAMVTALTKGHRKFKLLAVATELEAPCSPCGICRQYLIEFGDYKVILGSSTSDQIIETTTYGLLPYAFTPKSLDDHEKEAEERNHQEGEKKH

SEQ ID NO: 172 - protein, 162 aa, synthetic construct
  REGION 1..162: note = pYY-BEM4.63; tr|A0A2E1PHI6|A0A2E1PHI6_9GAMM polypeptide sequence
MKELLIHSWLMLNSNSKLIMERVIELSEINLKNGKIPIAAVIVDKKNYEIISESQNEDSPIGHAELLAITKALKKLNTNRLDSTNLFVTIEPCPMCAYAISKCHINRLYFGSEDEKGGGVINGPRIFESHNLKKIDYVSHCYHEKTTQLMQSFFQLKRNQQL

SEQ ID NO: 173 - protein, 133 aa, synthetic construct
  REGION 1..133: note = pYY-BEM4.64; tr|A0A378LUA7|A0A378LUA7_9GAMM polypeptide sequence
MDTIIKKMISNAHNTLAHSYSPYSKFSVASCICTDKDNFYTGVNVENSAYGLAICAETSAISAMVTAGEKRIKSMVVMAGTNILCSPCGACRQRIYEFSTPDTLIHLCDKNSILRTFKINELLPEAFKFDFNP

SEQ ID NO: 174 - protein, 370 aa, synthetic construct
  REGION 1..370: note = pYY-BEM4.65; tr|A0A139HQ78|A0A139HQ78_9PEZI polypeptide sequence
MADSLKSKPGHARHDTALIHGLSQSDVQKLSESCVDAKSKAYCPYSHFRVGCAVLLANGDVVQGANVENAAYPVGTCAERVALGTAVGAKKGDFRALAVSTDISPPASPCGMCRQFIREFCELNTPILMYDKDGKSVVMTLEQLLPMSFGPDKLLPPGQLENGLMQTQTQSSFVTRAFSTTSSRRQDDTPQVPQSHYDFFPQTFPQGPPPKTSFSPDLKQLRKEFLQLQAKAHPDLAPQDQKRRAEALSMRINEAYKTLQSPLRRAQYLLSQQGIDVEDETAKLDDSSLLMEVMEAREAVEEVEDEEQLNEIRAENNGRIEESVRVLEDAFRDNEFEKAAQEAIRLRYWVNIEESIQGWEKGNGGGILHH

SEQ ID NO: 175 - protein, 165 aa, synthetic construct
  REGION 1..165: note = pYY-BEM4.66; tr|A0A2A9FXV0|A0A2A9FXV0_9VIBR polypeptide sequence
MCNLKENKDMDKYFHFACDATIEGMREGTGGPFGATLTRNGEVVCSVANTVLKDMDISGHAEMVAVREACKKLDTLDLSDCVMYATCEPCPMCVSVMLWAGIKTCYYASTHLDAAKHGFSDQQLRDYLDGSDTSTLNMVHIEDNRDDCAKIWTEFRHLNETKNDG

SEQ ID NO: 176 - protein, 509 aa, synthetic construct
  REGION 1..509: note = pYY-BEM4.67; tr|A0A1A8AG96|A0A1A8AG96_NOTFU polypeptide sequence
MEHSDRWSRAEPGLSTSSRETRDGSTQTDCKLQGHGPRLSKVNLFTLLSLWMELFPQEQDEENGQSQIRRSGLVVVREGKVVGLHCSGADLHAGQAAILQHGASLANCQLFFSRRPCATCLKMIINAGVRQITFWPGDPEISMLTSNQTHSQRTSQSITEASLDATAVEKLKSNSRPQICVLMQPLAPGVLQFVDETSRRSDFMERMMDDDPELDSEKLFNSDRLRHLKDFCRHFLIQTDQRHKDILSQMGLKNFCVEPYFSNLRSNMTELVEVLAAVAAGMPQQHYGFYREESLSLDPHPVDVSQAVARHCIVQARLLSYRTEDPKVGVGAVIWAKGQSACCCGTGRLYLIGCGYNAYPAGSKYAEYPQMDNKQEDRERRKYRYIVHAEQNALTFRTRDIKPDECSMLFVTKCPCDECIPLIRGAGVKHIYTSDQDRDKDKGDISYLRFGSLKGVCKFIWQRSPPVSSASSLHLTNGCVGKHVRQAEQQIYKNKKLCTKGSSGSSDIC

SEQ ID NO: 177 - protein, 148 aa, synthetic construct
  REGION 1..148: note = pYY-BEM4.68; tr|A0A3E2VN88|A0A3E2VN88_9FIRM polypeptide sequence
MEKEITNMDKQKLIQMAVDGLGRSYAPYSHFHVSAALLCADGTVYTGNNIENAAYTPSVCAERCAIFKAVGDGRREFEAIAVCGGPDGVIEDYCPPCGVCRQVMREFCDPSSFRVLVAKTAEDYREYTLEQLLPDGFGPDHLTGSGER

SEQ ID NO: 178 - protein, 221 aa, synthetic construct
  REGION 1..221: note = pYY-BEM4.69; tr|A0A2D5ZRJ2|A0A2D5ZRJ2_9BACT polypeptide sequence
MARPVHLHTGERRTEEGATESRAVAAVATAITRAPRAPPRPATGRERDGPPPRRVFGGGLRVGDPSGYDRGESKPIGGPLTEKRSDWHSYFMRIAGEVATRATCDRKHVGAVIVRNRTILSTGYNGSIRGMPHCDDVGHDMVDGHCIATIHAEANAILQAARNGVMIQDGSIYITASPCWNCFKLVANAGLKRVYYGEFYRDKRSFEVARRLGIDLMHIEV

SEQ ID NO: 179 - protein, 155 aa, synthetic construct
  REGION 1..155: note = pYY-BEM4.70; tr|A0A1B8WPS3|A0A1B8WPS3_9BACI polypeptide sequence
MEGVQLIYQFQWGNLIMTVNKEDLYLIDVARNTIKTLYVDGKHHVGAAVRTKTGKIYSAVHLEANIGRVSVCAEAIALGKAISEGESEFDTIVAVRHPDPTQENQKIEVVSPCGICRELISDYGKGTNVILKNKEGYIKTVISDLLPNKYIREDN

SEQ ID NO: 180 - protein, 156 aa, synthetic construct
  REGION 1..156: note = pYY-BEM4.71; tr|A0A1W5ZQK9|A0A1W5ZQK9_9BACI polypeptide sequence
MNRFMERAVSLAAENVRVGGQPFGAVLVKDDELVAEGVNEMHLNYDVSGHAELLAIRRAQGELQTHDLSGYTMYASGEPCPMCLSAMYFAGIKDVFYCATVEEAAQVGLEKSKNVYDDLQKSKGERSLVMKQMPLEDDQEDPMKLWDERTNHNGTS

SEQ ID NO: 181 - protein, 340 aa, synthetic construct
  REGION 1..340: note = pYY-BEM4.72; tr|A0A378V0W4|A0A378V0W4_MYCFO polypeptide sequence
MVHAQFDPTARQALAATAVEAKTRKDLTWQQIADAAELSPAFVTAAVLGQHALPARSAEAVAALLGLDDDAALLLQTIPIRGSIPGGIPTDPTIYRFYEMLQVYGTTLKALVHEQFGDGIISAINFKLDVRKVADPEGGERAVITLDGKYLPPNPFDRVRYRGGLMDFAQRTIDIARQNVAEGGRPFATVIVKNGEILAESPNLVAQTHDPTAHAEILAIRKACTRIGTEHLIGATIYVLAQPCPMCLGSLYYCSPDEVVFLTTRDAYEPHYVDDRKYFELNMFYDEFAKPWDQRRLPMRYEPRDAAVDVYKLWQERNGGERRVPGAPTSTRPGKNPRGE

SEQ ID NO: 182 - protein, 157 aa, synthetic construct
  REGION 1..157: note = pYY-BEM4.73; tr|I3XF03|I3XF03_RHIFR polypeptide sequence
MKQRCMSPKSAQRFWDNDMHNNKDRPMSENELFVAAREAMAKAHAPYSKFPVGAAIRAEDGQIYTGANIENLSFPEGWCAETTAISHMVMAGQRKIMEVAVIAEKLALCPPCGGCRQRLAEFSGASTRIYLCDETGIKKSLALSDLLPHSFETEILG

SEQ ID NO: 183 - protein, 595 aa, synthetic construct
  REGION 1..595: note = pYY-BEM4.74; tr|F8IEF3|F8IEF3_ALIAT polypeptide sequence
MDAKELETRGWLCMRAVDVIDKKRRGEALAEEELRFLIEGYVAGRIPDYQMSAFLMAVVWRGMTREETLVLTRLLADSGERLDLSGIPGVKVDKHSTGGVGDKATLVVLPLVASIGVPVIKMSGRGLGHTGGTIDKLESIPGFRTDLSVAELVAQVRQVGIALGGQTADLAPADKKLYALRDVTGTVESLPLIASSVMSKKLAGGADAIVLDVKVGDGAFMKSRSDARRLARLMVEIGEAAGRRTVAVLSNMDQPLGCAIGNALEVAEAIRVLSGEGPFDLAEIALALAEEMTVLAGVAATREEARRMLRQSVAEGRALETLRRWIAAQGGDPAVVDDPSRLPQAPVQMPYLPKKAGFVAKLSALAFGLAAMRLGAGRETKEEAIDPSVGIVLHAKVGDRVQTHRPMFTVHARTGEDALRCIQELEAAIQISDDPVEAPPLILARIDRSEALPYADLMDAAREARDRAYVPYSGFAVGAALELADGRMVTGANVENASYGLTNCAERSAVFRAVAEGGPGTKPEIRAVAVIADSPEPVSPCGACRQVLAEFCSPDTPVYLGNLQGDVRETTVGALLPGAFTDAQMANVRRQDKEA

SEQ ID NO: 184 - protein, 153 aa, synthetic construct
  REGION 1..153: note = pYY-BEM4.75; tr|A0A1G3M638|A0A1G3M638_9SPIR polypeptide sequence
MKTTNINALDKWDLRFLQMAEHVAEWSKDPSTKVGAVIVRPDRTIASVGFNGFARGVRDTVERLWNRELKYPLTVHAELNAILSAHEPVRGHSLYVSPLSPCSNCAGVIIQSGIARVVAKCGQVNNPAQWSESFNLALTAFAEAGVSVILVEH

SEQ ID NO: 185 - protein, 177 aa, synthetic construct
  REGION 1..177: note = pYY-BEM4.76; tr|A0A3D9LFR2|A0A3D9LFR2_9MICC polypeptide sequence
MEQNDHGSSGAFSDPFEDDIPLTASLPRITGTGSGIDWQRLESTARAAMTRAYVPYSRFPVGAAALVEDGRVVAGCNIENASLGLTLCAECSLVSNLQMSGGGRIVAFYCVDGNGEVLMPCGRCRQLLYEFHAPGMRLMGPDGELTMDEVLPLAFGPADMTHLSDSAASTDDPGRTR

SEQ ID NO: 186 - protein, 172 aa, synthetic construct
  REGION 1..172: note = pYY-BEM4.77; tr|A0A3B9YGB5|A0A3B9YGB5_9BACT polypeptide sequence
MAKPISKKYRKLIETAKAARKKAYSPYSRYQVGAAVLTESGRIYSGANMENASYGLCMCAERVAIANAVTRGEKVLQAVCVVGKKARPCGACRQVMLEFSTKETELLMVDIDPNARRDTVIRTRVYSMLPNPFDPFESGMLPQHPQNLLRRRKSPQPRRKRRSRPVHREVSR

SEQ ID NO: 187 - protein, 391 aa, synthetic construct
  REGION 1..391: note = pYY-BEM4.78; tr|A0A182F569|A0A182F569_ANOAL polypeptide sequence
MPRPSQFRVSSSQSLSNSQIQASQSSDSVVDITSYVNAVVKALLNLSCTKTIIKRADLVNIALKGNGRLIGRVLQDANIELKEIYGYELIEVEKSKTMILCSTLAAGSMDELNDANRRRYTFLYLILGYIFMKNGSVPETIVWEFLETLGIEEQQEHNYFGDVRKLYDSLFKQAYLTRTKQALEGLNDDVMLISWGVRSKHEVSKKDILAGFCKVMNRDPVDFKAQYIEANEKDDKMNNNINGTVDGRNTVEYSSLDASVKELIEAAIKVRNNAYCPYSNFAVGAALRTVGGDIVTGCNVENGTFGPSVCAERTAVCKAVSEGHREFTAVAVVAFQETEFTAPCGTCRQTLSEFSRKDIPIYLVKPSPVRVMVTSLFQLLPHAFSPSFLNK

SEQ ID NO: 188 - protein, 151 aa, synthetic construct
  REGION 1..151: note = pYY-BEM4.79; tr|A0A264Z0D4|A0A264Z0D4_9BACI polypeptide sequence
MEPKKLIEEAIVASKQAYVQYSNFHVGAALLTKDGKLYHGCNIENASYGLTNCAERTAIFKAVSEGEKEFQAIAVVGDTEGPISPCGACRQVLAEFFSPDTVVILANLKGDHVVTNINELLPGFFSSKDLQKKVKNCFEKNALGSSCLRPI

SEQ ID NO: 189 - protein, 229 aa, synthetic construct
  REGION 1..229: note = pYY-BEM4.80; tr|A0A1L9Q1R3|A0A1L9Q1R3_ASPVE polypeptide sequence
MPLSAEEAALVETATATINSIPLSEDYSVASAAKASDGRVFTGVNVYHFTGGPCAELVVLGVAAAAGAAQLTHIVAVANEQRGILSPCGRCRQVLLDLQPNIQVIVGKEGSEQSVPVAQLLPFSYRQPDQHTPVIFKALTSSGPVVVDFFATWCGPCKAVAPVVGKLSETYTDVRFIQVDVDKARSISQEHDIRAMPTFVLYKDGKLLDKRVVGGNMKELEEQIKAIIA

SEQ ID NO: 190 - protein, 18 aa, synthetic construct
  REGION 1..18: note = synthetic peptide
KRTADGSEFESPKKKRKV

SEQ ID NO: 191 - protein, 16 aa, synthetic construct
  REGION 1..16: note = synthetic peptide
KRPAATKKAGQAKKKK

SEQ ID NO: 192 - protein, 17 aa, synthetic construct
  REGION 1..17: note = synthetic peptide
KKTELQTTNAENKTKKL

SEQ ID NO: 193 - protein, 19 aa, synthetic construct
  REGION 1..19: note = synthetic peptide
KRGINDRNFWRGENGRKTR

SEQ ID NO: 194 - protein, 16 aa, synthetic construct
  REGION 1..16: note = synthetic peptide
RKSGKIAAIVVKRPRK

SEQ ID NO: 195 - protein, 7 aa, synthetic construct
  REGION 1..7: note = synthetic peptide
PKKKRKV

SEQ ID NO: 196 - protein, 30 aa, synthetic construct
  REGION 1..30: note = synthetic polypeptide
MDSLLMNRRKFLYQFKNVRWAKGRRETYLC

SEQ ID NO: 197 - protein, 1368 aa, Streptococcus pyogenes [sequence omitted]

SEQ ID NO: 198 - DNA, 4104 bp, Streptococcus pyogenes
  misc_feature 1..4104: note = wild type spCas9 polynucleotide sequence
  source 1..4104: mol_type = genomic DNA
atggataagaaatactcaataggcttagatatcggcacaaatagcgtcggatgggcggtgatcactgatgattataaggttccgtctaaaaagttcaaggttctgggaaatacagaccgccacagtatcaaaaaaaatcttataggggctcttttatttggcagtggagagacagcggaagcgactcgtctcaaacggacagctcgtagaaggtatacacgtcggaagaatcgtatttgttatctacaggagattttttcaaatgagatggcgaaagtagatgatagtttctttcatcgacttgaagagtcttttttggtggaagaagacaagaagcatgaacgtcatcctatttttggaaatatagtagatgaagttgcttatcatgagaaatatccaactatctatcatctgcgaaaaaaattggcagattctactgataaagcggatttgcgcttaatctatttggccttagcgcatatgattaagtttcgtggtcattttttgattgagggagatttaaatcctgataatagtgatgtggacaaactatttatccagttggtacaaatctacaatcaattatttgaagaaaaccctattaacgcaagtagagtagatgctaaagcgattctttctgcacgattgagtaaatcaagacgattagaaaatctcattgctcagctccccggtgagaagagaaatggcttgtttgggaatctcattgctttgtcattgggattgacccctaattttaaatcaaattttgatttggcagaagatgctaaattacagctttcaaaagatacttacgatgatgatttagataatttattggcgcaaattggagatcaatatgctgatttgtttttggcagctaagaatttatcagatgctattttactttcagatatcctaagagtaaatagtgaaataactaaggctcccctatcagcttcaatgattaagcgctacgatgaacatcatcaagacttgactcttttaaaagctttagttcgacaacaacttccagaaaagtataaagaaatcttttttgatcaatcaaaaaacggatatgcaggttatattgatgggggagctagccaagaagaattttataaatttatcaaaccaattttagaaaaaatggatggtactgaggaattattggtgaaactaaatcgtgaagatttgctgcgcaagcaacggacctttgacaacggctctattccccatcaaattcacttgggtgagctgcatgctattttgagaagacaagaagacttttatccatttttaaaagacaatcgtgagaagattgaaaaaatcttgacttttcgaattccttattatgttggtccattggcgcgtggcaatagtcgttttgcatggatgactcggaagtctgaagaaacaattaccccatggaattttgaagaagttgtcgataaaggtgcttcagctcaatcatttattgaacgcatgacaaactttgataaaaatcttccaaatgaaaaagtactaccaaaacatagtttgctttatgagtattttacggtttataacgaattgacaaaggtcaaatatgttactgagggaatgcgaaaaccagcatttctttcaggtgaacagaagaaagccattgttgatttactcttcaaaacaaatcgaaaagtaaccgttaagcaattaaaagaagattatttcaaaaaaatagaatgttttgatagtgttgaaatttcaggagttgaagatagatttaatgcttcattaggcgcctaccatgatttgctaaaaattattaaagataaagattttttggataatgaagaaaatgaagatatcttagaggatattgttttaacattgaccttatttgaagatagggggatgattgaggaaagacttaaaacatatgctcacctctttgatgataaggtgatgaaacagcttaaacgtcgccgttatactggttggggacgtttgtctcgaaaattgattaatggtattagggataagcaatctggcaaaacaatattagattttttgaaatcagatggttttgccaatcgcaattttatgcagctgatccatgatgatagtttgacatttaaagaagatattcaaaaagcacaggtgtctggacaaggccatagtttacatgaacagattgctaacttagctggcagtcctgctattaaaaaaggtattttacagactgtaaaaattgttgatgaactggtcaaagtaatggggcataagccagaaaatatcgttattgaaatggcacgtgaaaatcagacaactcaaaagggccagaaaaattcgcgagagcgtatgaaacgaatcgaagaaggtatcaaagaattaggaagtcagattcttaaagagcatcctgttgaaaatactcaattgcaaaatgaaaagctctatctctattatctacaaaatggaagagacatgtatgtggaccaagaattagatattaatcgtttaagtgattatgatgtcgatcacattgttccacaaagtttcattaaagacgattcaatagacaataaggtactaacgcgttctgataaaaatcgtggtaaatcggataacgttccaagtgaagaagtagtcaaaaagatgaaaaactattggagacaacttctaaacgccaagttaatcactcaacgtaagtttgataatttaacgaaagctgaacgtggaggtttgagtgaacttgataaagctggttttatcaaacgccaattggttgaaactcgccaaatcactaagcatgtggcacaaattttggatagtcgcatgaatactaaatacgatgaaaatgataaacttattcgagaggttaaagtgattaccttaaaatctaaattagtttctgacttccgaaaagatttccaattctataaagtacgtgagattaacaattaccatcatgcccatgatgcgtatctaaatgccgtcgttggaactgctttgattaagaaatatccaaaacttgaatcggagtttgtctatggtgattataaagtttatgatgttcgtaaaatgattgctaagtctgagcaagaaataggcaaagcaaccgcaaaatatttcttttactctaatatcatgaacttcttcaaaacagaaattacacttgcaaatggagagattcgcaaacgccctctaatcgaaactaatggggaaactggagaaattgtctgggataaagggcgagattttgccacagtgcgcaaagtattgtccatgccccaagtcaatattgtcaagaaaacagaagtacagacaggcggattctccaaggagtcaattttaccaaaaagaaattcggacaagcttattgctcgtaaaaaagactgggatccaaaaaaatatggtggttttgatagtccaacggtagcttattcagtcctagtggttgctaaggtggaaaaagggaaatcgaagaagttaaaatccgttaaagagttactagggatcacaattatggaaagaagttcctttgaaaaaaatccgattgactttttagaagctaaaggatataaggaagttaaaaaagacttaatcattaaactacctaaatatagtctttttgagttagaaaacggtcgtaaacggatgctggctagtgccggagaattacaaaaaggaaatgagctggctctgccaagcaaatatgtgaattttttatatttagctagtcattatgaaaagttgaagggtagtccagaagataacgaacaaaaacaattgtttgtggagcagcataagcattatttagatgagattattgagcaaatcagtgaattttctaagcgtgttattttagcagatgccaatttagataaagttcttagtgcatataacaaacatagagacaaaccaatacgtgaacaagcagaaaatattattcatttatttacgttgacgaatcttggagctcccgctgcttttaaatattttgatacaacaattgatcgtaaacgatatacgtctacaaaagaagttttagatgccactcttatccatcaatccatcactggtctttatgaaacacgcattgatttgagtcagctaggaggtgactga

SEQ ID NO: 199 - protein, 1367 aa, Streptococcus pyogenes
  REGION 1..1367: note = MISC_FEATURE - spCas9 polypeptide sequence
MDKKYSIGLDIGTNSVGWAVITDDYKVPSKKFKVLGNTDRHSIKKNLIGALLFGSGETAEATRLKRTARRRYTRRKNRICYLQEIFSNEMAKVDDSFFHRLEESFLVEEDKKHERHPIFGNIVDEVAYHEKYPTIYHLRKKLADSTDKADLRLIYLALAHMIKFRGHFLIEGDLNPDNSDVDKLFIQLVQIYNQLFEENPINASRVDAKAILSARLSKSRRLENLIAQLPGEKRNGLFGNLIALSLGLTPNFKSNFDLAEDAKLQLSKDTYDDDLDNLLAQIGDQYADLFLAAKNLSDAILLSDILRVNSEITKAPLSASMIKRYDEHHQDLTLLKALVRQQLPEKYKEIFFDQSKNGYAGYIDGGASQEEFYKFIKPILEKMDGTEELLVKLNREDLLRKQRTFDNGSIPHQIHLGELHAILRRQEDFYPFLKDNREKIEKILTFRIPYYVGPLARGNSRFAWMTRKSEETITPWNFEEVVDKGASAQSFIERMTNFDKNLPNEKVLPKHSLLYEYFTVYNELTKVKYVTEGMRKPAFLSGEQKKAIVDLLFKTNRKVTVKQLKEDYFKKIECFDSVEISGVEDRFNASLGAYHDLLKIIKDKDFLDNEENEDILEDIVLTLTLFEDRGMIEERLKTYAHLFDDKVMKQLKRRRYTGWGRLSRKLINGIRDKQSGKTILDFLKSDGFANRNFMQLIHDDSLTFKEDIQKAQVSGQGHSLHEQIANLAGSPAIKKGILQTVKIVDELVKVMGHKPENIVIEMARENQTTQKGQKNSRERMKRIEEGIKELGSQILKEHPVENTQLQNEKLYLYYLQNGRDMYVDQELDINRLSDYDVDHIVPQSFIKDDSIDNKVLTRSDKNRGKSDNVPSEEVVKKMKNYWRQLLNAKLITQRKFDNLTKAERGGLSELDKAGFIKRQLVETRQITKHVAQILDSRMNTKYDENDKLIREVKVITLKSKLVSDFRKDFQFYKVREINNYHHAHDAYLNAVVGTALIKKYPKLESEFVYGDYKVYDVRKMIAKSEQEIGKATAKYFFYSNIMNFFKTEITLANGEIRKRPLIETNGETGEIVWDKGRDFATVRKVLSMPQVNIVKKTEVQTGGFSKESILPKRNSDKLIARKKDWDPKKYGGFDSPTVAYSVLVVAKVEKGKSKKLKSVKELLGITIMERSSFEKNPIDFLEAKGYKEVKKDLIIKLPKYSLFELENGRKRMLASAGELQKGNELALPSKYVNFLYLASHYEKLKGSPEDNEQKQLFVEQHKHYLDEIIEQISEFSKRVILADANLDKVLSAYNKHRDKPIREQAENIIHLFTLTNLGAPAAFKYFDTTIDRKRYTSTKEVLDATLIHQSITGLYETRIDLSQLGGD

SEQ ID NO: 200 - DNA, 4212 bp, synthetic construct
  misc_feature 1..4212: note = wild-type Cas9 polynucleotide sequence
  misc_feature 5..58: note = RuvC domain
  misc_feature 718..764: note = RuvC domain
  misc_feature 772..901: note = HNH domain
  misc_feature 906..1101: note = RuvC domain
  source 1..4212: mol_type = other DNA
atggataaaaagtattctattggtttagacatcggcactaattccgttggatgggctgtcataaccgatgaatacaaagtaccttcaaagaaatttaaggtgttggggaacacagaccgtcattcgattaaaaagaatcttatcggtgccctcctattcgatagtggcgaaacggcagaggcgactcgcctgaaacgaaccgctcggagaaggtatacacgtcgcaagaaccgaatatgttacttacaagaaatttttagcaatgagatggccaaagttgacgattctttctttcaccgtttggaagagtccttccttgtcgaagaggacaagaaacatgaacggcaccccatctttggaaacatagtagatgaggtggcatatcatgaaaagtacccaacgatttatcacctcagaaaaaagctagttgactcaactgataaagcggacctgaggttaatctacttggctcttgcccatatgataaagttccgtgggcactttctcattgagggtgatctaaatccggacaactcggatgtcgacaaactgttcatccagttagtacaaacctataatcagttgtttgaagagaaccctataaatgcaagtggcgtggatgcgaaggctattcttagcgcccgcctctctaaatcccgacggctagaaaacctgatcgcacaattacccggagagaagaaaaatgggttgttcggtaaccttatagcgctctcactaggcctgacaccaaattttaagtcgaacttcgacttagctgaagatgccaaattgcagcttagtaaggacacgtacgatgacgatctcgacaatctactggcacaaattggagatcagtatgcggacttatttttggctgccaaaaaccttagcgatgcaatcctcctatctgacatactgagagttaatactgagattaccaaggcgccgttatccgcttcaatgatcaaaaggtacgatgaacatcaccaagacttgacacttctcaaggccctagtccgtcagcaactgcctgagaaatataaggaaatattctttgatcagtcgaaaaacgggtacgcaggttatattgacggcggagcgagtcaagaggaattctacaagtttatcaaacccatattagagaagatggatgggacggaagagttgcttgtaaaactcaatcgcgaagatctactgcgaaagcagcggactttcgacaacggtagcattccacatcaaatccacttaggcgaattgcatgctatacttagaaggcaggaggatttttatccgttcctcaaagacaatcgtgaaaagattgagaaaatcctaacctttcgcataccttactatgtgggacccctggcccgagggaactctcggttcgcatggatgacaagaaagtccgaagaaacgattactccatggaattttgaggaagttgtcgataaaggtgcgtcagctcaatcgttcatcgagaggatgaccaactttgacaagaatttaccgaacgaaaaagtattgcctaagcacagtttactttacgagtatttcacagtgtacaatgaactcacgaaagttaagtatgtcactgagggcatgcgtaaacccgcctttctaagcggagaacagaagaaagcaatagtagatctgttattcaagaccaaccgcaaagtgacagttaagcaattgaaagaggactactttaagaaaattgaatgcttcgattctgtcgagatctccggggtagaagatcgatttaatgcgtcacttggtacgtatcatgacctcctaaagataattaaagataaggacttcctggataacgaagagaatgaagatatcttagaagatatagtgttgactcttaccctctttgaagatcgggaaatgattgaggaaagactaaaaacatacgctcacctgttcgacgataaggttatgaaacagttaaagaggcgtcgctatacgggctggggacgattgtcgcggaaacttatcaacgggataagagacaagcaaagtggtaaaactattctcgattttctaaagagcgacggcttcgccaataggaactttatgcagctgatccatgatgactctttaaccttcaaagaggatatacaaaaggcacaggtttccggacaaggggactcattgcacgaacatattgcgaatcttgctggttcgccagccatcaaaaagggcatactccagacagtcaaagtagtggatgagctagttaaggtcatgggacgtcacaaaccggaaaacattgtaatcgagatggcacgcgaaaatcaaacgactcagaaggggcaaaaaaacagtcgagagcggatgaagagaatagaagagggtattaaagaactgggcagccagatcttaaaggagcatcctgtggaaaatacccaattgcagaacgagaaactttacctctattacctacaaaatggaagggacatgtatgttgatcaggaactggacataaaccgtttatctgattacgacgtcgatcacattgtaccccaatcctttttgaaggacgattcaatcgacaataaagtgcttacacgctcggataagaaccgagggaaaagtgacaatgttccaagcgaggaagtcgtaaagaaaatgaagaactattggcggcagctcctaaatgcgaaactgataacgcaaagaaagttcgataacttaactaaagctgagaggggtggcttgtctgaacttgacaaggccggatttattaaacgtcagctcgtggaaacccgccaaatcacaaagcatgttgcacagatactagattcccgaatgaatacgaaatacgacgagaacgataagctgattcgggaagtcaaagtaatcactttaaagtcaaaattggtgtcggacttcagaaaggattttcaattctataaagttagggagataaataactaccaccatgcgcacgacgcttatcttaatgccgtcgtagggaccgcactcattaagaaatacccgaagctagaaagtgagtttgtgtatggtgattacaaagtttatgacgtccgtaagatgatcgcgaaaagcgaacaggagataggcaaggctacagccaaatacttcttttattctaacattatgaatttctttaagacggaaatcactctggcaaacggagagatacgcaaacgacctttaattgaaaccaatggggagacaggtgaaatcgtatgggataagggccgggacttcgcgacggtgagaaaagttttgtccatgccccaagtcaacatagtaaagaaaactgaggtgcagaccggagggttttcaaaggaatcgattcttccaaaaaggaatagtgataagctcatcgctcgtaaaaaggactgggacccgaaaaagtacggtggcttcgatagccctacagttgcctattctgtcctagtagtggcaaaagttgagaagggaaaatccaagaaactgaagtcagtcaaagaattattggggataacgattatggagcgctcgtcttttgaaaagaaccccatcgacttccttgaggcgaaaggttacaaggaagtaaaaaaggatctcataattaaactaccaaagtatagtctgtttgagttagaaaatggccgaaaacggatgttggctagcgccggagagcttcaaaaggggaacgaactcgcactaccgtctaaatacgtgaatttcctgtatttagcgtcccattacgagaagttgaaaggttcacctgaagataacgaacagaagcaactttttgttgagcagcacaaacattatctcgacgaaatcatagagcaaatttcggaattcagtaagagagtcatcctagctgatgccaatctggacaaagtattaagcgcatacaacaagcacagggataaacccatacgtgagcaggcggaaaatattatccatttgtttactcttaccaacctcggcgctccagccgcattcaagtattttgacacaacgatagatcgcaaacgatacacttctaccaaggaggtgctagacgcgacactgattcaccaatccatcacgggattatatgaaactcggatagatttgtcacagcttgggggtgacggatcccccaagaagaagaggaaagtctcgagcgactacaaagaccatgacggtgattataaagatcatgacatcgattacaaggatgacgatgacaaggctgcagga

SEQ ID NO: 201 - protein, 1368 aa, synthetic construct
  REGION 1..1368: note = exemplary catalytically active Cas9 nickase (nCas9) polypeptide sequence
MDKKYSIGLAIGTNSVGWAVITDEYKVPSKKFKVLGNTDRHSIKKNLIGALLFDSGETAEATRLKRTARRRYTRRKNRICYLQEIFSNEMAKVDDSFFHRLEESFLVEEDKKHERHPIFGNIVDEVAYHEKYPTIYHLRKKLVDSTDKADLRLIYLALAHMIKFRGHFLIEGDLNPDNSDVDKLFIQLVQTYNQLFEENPINASGVDAKAILSARLSKSRRLENLIAQLPGEKKNGLFGNLIALSLGLTPNFKSNFDLAEDAKLQLSKDTYDDDLDNLLAQIGDQYADLFLAAKNLSDAILLSDILRVNTEITKAPLSASMIKRYDEHHQDLTLLKALVRQQLPEKYKEIFFDQSKNGYAGYIDGGASQEEFYKFIKPILEKMDGTEELLVKLNREDLLRKQRTFDNGSIPHQIHLGELHAILRRQEDFYPFLKDNREKIEKILTFRIPYYVGPLARGNSRFAWMTRKSEETITPWNFEEVVDKGASAQSFIERMTNFDKNLPNEKVLPKHSLLYEYFTVYNELTKVKYVTEGMRKPAFLSGEQKKAIVDLLFKTNRKVTVKQLKEDYFKKIECFDSVEISGVEDRFNASLGTYHDLLKIIKDKDFLDNEENEDILEDIVLTLTLFEDREMIEERLKTYAHLFDDKVMKQLKRRRYTGWGRLSRKLINGIRDKQSGKTILDFLKSDGFANRNFMQLIHDDSLTFKEDIQKAQVSGQGDSLHEHIANLAGSPAIKKGILQTVKVVDELVKVMGRHKPENIVIEMARENQTTQKGQKNSRERMKRIEEGIKELGSQILKEHPVENTQLQNEKLYLYYLQNGRDMYVDQELDINRLSDYDVDHIVPQSFLKDDSIDNKVLTRSDKNRGKSDNVPSEEVVKKMKNYWRQLLNAKLITQRKFDNLTKAERGGLSELDKAGFIKRQLVETRQITKHVAQILDSRMNTKYDENDKLIREVKVITLKSKLVSDFRKDFQFYKVREINNYHHAHDAYLNAVVGTALIKKYPKLESEFVYGDYKVYDVRKMIAKSEQEIGKATAKYFFYSNIMNFFKTEITLANGEIRKRPLIETNGETGEIVWDKGRDFATVRKVLSMPQVNIVKKTEVQTGGFSKESILPKRNSDKLIARKKDWDPKKYGGFDSPTVAYSVLVVAKVEKGKSKKLKSVKELLGITIMERSSFEKNPIDFLEAKGYKEVKKDLIIKLPKYSLFELENGRKRMLASAGELQKGNELALPSKYVNFLYLASHYEKLKGSPEDNEQKQLFVEQHKHYLDEIIEQISEFSKRVILADANLDKVLSAYNKHRDKPIREQAENIIHLFTLTNLGAPAAFKYFDTTIDRKRYTSTKEVLDATLIHQSITGLYETRIDLSQLGGD

SEQ ID NO: 202 - DNA, 4107 bp, Streptococcus pyogenes
  misc_feature 1..4107: note = Cas9 from Streptococcus pyogenes (NCBI Ref. Seq.: NC_002737.2)polynucleotide sequence
  source 1..4107: mol_type = genomic DNA
atggataagaaatactcaataggcttagatatcggcacaaatagcgtcggatgggcggtgatcactgatgaatataaggttccgtctaaaaagttcaaggttctgggaaatacagaccgccacagtatcaaaaaaaatcttataggggctcttttatttgacagtggagagacagcggaagcgactcgtctcaaacggacagctcgtagaaggtatacacgtcggaagaatcgtatttgttatctacaggagattttttcaaatgagatggcgaaagtagatgatagtttctttcatcgacttgaagagtcttttttggtggaagaagacaagaagcatgaacgtcatcctatttttggaaatatagtagatgaagttgcttatcatgagaaatatccaactatctatcatctgcgaaaaaaattggtagattctactgataaagcggatttgcgcttaatctatttggccttagcgcatatgattaagtttcgtggtcattttttgattgagggagatttaaatcctgataatagtgatgtggacaaactatttatccagttggtacaaacctacaatcaattatttgaagaaaaccctattaacgcaagtggagtagatgctaaagcgattctttctgcacgattgagtaaatcaagacgattagaaaatctcattgctcagctccccggtgagaagaaaaatggcttatttgggaatctcattgctttgtcattgggtttgacccctaattttaaatcaaattttgatttggcagaagatgctaaattacagctttcaaaagatacttacgatgatgatttagataatttattggcgcaaattggagatcaatatgctgatttgtttttggcagctaagaatttatcagatgctattttactttcagatatcctaagagtaaatactgaaataactaaggctcccctatcagcttcaatgattaaacgctacgatgaacatcatcaagacttgactcttttaaaagctttagttcgacaacaacttccagaaaagtataaagaaatcttttttgatcaatcaaaaaacggatatgcaggttatattgatgggggagctagccaagaagaattttataaatttatcaaaccaattttagaaaaaatggatggtactgaggaattattggtgaaactaaatcgtgaagatttgctgcgcaagcaacggacctttgacaacggctctattccccatcaaattcacttgggtgagctgcatgctattttgagaagacaagaagacttttatccatttttaaaagacaatcgtgagaagattgaaaaaatcttgacttttcgaattccttattatgttggtccattggcgcgtggcaatagtcgttttgcatggatgactcggaagtctgaagaaacaattaccccatggaattttgaagaagttgtcgataaaggtgcttcagctcaatcatttattgaacgcatgacaaactttgataaaaatcttccaaatgaaaaagtactaccaaaacatagtttgctttatgagtattttacggtttataacgaattgacaaaggtcaaatatgttactgaaggaatgcgaaaaccagcatttctttcaggtgaacagaagaaagccattgttgatttactcttcaaaacaaatcgaaaagtaaccgttaagcaattaaaagaagattatttcaaaaaaatagaatgttttgatagtgttgaaatttcaggagttgaagatagatttaatgcttcattaggtacctaccatgatttgctaaaaattattaaagataaagattttttggataatgaagaaaatgaagatatcttagaggatattgttttaacattgaccttatttgaagatagggagatgattgaggaaagacttaaaacatatgctcacctctttgatgataaggtgatgaaacagcttaaacgtcgccgttatactggttggggacgtttgtctcgaaaattgattaatggtattagggataagcaatctggcaaaacaatattagattttttgaaatcagatggttttgccaatcgcaattttatgcagctgatccatgatgatagtttgacatttaaagaagacattcaaaaagcacaagtgtctggacaaggcgatagtttacatgaacatattgcaaatttagctggtagccctgctattaaaaaaggtattttacagactgtaaaagttgttgatgaattggtcaaagtaatggggcggcataagccagaaaatatcgttattgaaatggcacgtgaaaatcagacaactcaaaagggccagaaaaattcgcgagagcgtatgaaacgaatcgaagaaggtatcaaagaattaggaagtcagattcttaaagagcatcctgttgaaaatactcaattgcaaaatgaaaagctctatctctattatctccaaaatggaagagacatgtatgtggaccaagaattagatattaatcgtttaagtgattatgatgtcgatcacattgttccacaaagtttccttaaagacgattcaatagacaataaggtcttaacgcgttctgataaaaatcgtggtaaatcggataacgttccaagtgaagaagtagtcaaaaagatgaaaaactattggagacaacttctaaacgccaagttaatcactcaacgtaagtttgataatttaacgaaagctgaacgtggaggtttgagtgaacttgataaagctggttttatcaaacgccaattggttgaaactcgccaaatcactaagcatgtggcacaaattttggatagtcgcatgaatactaaatacgatgaaaatgataaacttattcgagaggttaaagtgattaccttaaaatctaaattagtttctgacttccgaaaagatttccaattctataaagtacgtgagattaacaattaccatcatgcccatgatgcgtatctaaatgccgtcgttggaactgctttgattaagaaatatccaaaacttgaatcggagtttgtctatggtgattataaagtttatgatgttcgtaaaatgattgctaagtctgagcaagaaataggcaaagcaaccgcaaaatatttcttttactctaatatcatgaacttcttcaaaacagaaattacacttgcaaatggagagattcgcaaacgccctctaatcgaaactaatggggaaactggagaaattgtctgggataaagggcgagattttgccacagtgcgcaaagtattgtccatgccccaagtcaatattgtcaagaaaacagaagtacagacaggcggattctccaaggagtcaattttaccaaaaagaaattcggacaagcttattgctcgtaaaaaagactgggatccaaaaaaatatggtggttttgatagtccaacggtagcttattcagtcctagtggttgctaaggtggaaaaagggaaatcgaagaagttaaaatccgttaaagagttactagggatcacaattatggaaagaagttcctttgaaaaaaatccgattgactttttagaagctaaaggatataaggaagttaaaaaagacttaatcattaaactacctaaatatagtctttttgagttagaaaacggtcgtaaacggatgctggctagtgccggagaattacaaaaaggaaatgagctggctctgccaagcaaatatgtgaattttttatatttagctagtcattatgaaaagttgaagggtagtccagaagataacgaacaaaaacaattgtttgtggagcagcataagcattatttagatgagattattgagcaaatcagtgaattttctaagcgtgttattttagcagatgccaatttagataaagttcttagtgcatataacaaacatagagacaaaccaatacgtgaacaagcagaaaatattattcatttatttacgttgacgaatcttggagctcccgctgcttttaaatattttgatacaacaattgatcgtaaacgatatacgtctacaaaagaagttttagatgccactcttatccatcaatccatcactggtctttatgaaacacgcattgatttgagtcagctaggaggtgactga

SEQ ID NO: 203 - protein, 1368 aa, synthetic construct
  REGION 1..1368: note = catalytically inactive Cas9 (dCas9)polypeptide sequence
  REGION 5..58: note = MISC_FEATURE - RuvC domain
  REGION 718..764: note = MISC_FEATURE - RuvC domain
  REGION 773..902: note = MISC_FEATURE - HNH domain
  REGION 907..1102: note = MISC_FEATURE - RuvC domain
MDKKYSIGLAIGTNSVGWAVITDEYKVPSKKFKVLGNTDRHSIKKNLIGALLFDSGETAEATRLKRTARRRYTRRKNRICYLQEIFSNEMAKVDDSFFHRLEESFLVEEDKKHERHPIFGNIVDEVAYHEKYPTIYHLRKKLVDSTDKADLRLIYLALAHMIKFRGHFLIEGDLNPDNSDVDKLFIQLVQTYNQLFEENPINASGVDAKAILSARLSKSRRLENLIAQLPGEKKNGLFGNLIALSLGLTPNFKSNFDLAEDAKLQLSKDTYDDDLDNLLAQIGDQYADLFLAAKNLSDAILLSDILRVNTEITKAPLSASMIKRYDEHHQDLTLLKALVRQQLPEKYKEIFFDQSKNGYAGYIDGGASQEEFYKFIKPILEKMDGTEELLVKLNREDLLRKQRTFDNGSIPHQIHLGELHAILRRQEDFYPFLKDNREKIEKILTFRIPYYVGPLARGNSRFAWMTRKSEETITPWNFEEVVDKGASAQSFIERMTNFDKNLPNEKVLPKHSLLYEYFTVYNELTKVKYVTEGMRKPAFLSGEQKKAIVDLLFKTNRKVTVKQLKEDYFKKIECFDSVEISGVEDRFNASLGTYHDLLKIIKDKDFLDNEENEDILEDIVLTLTLFEDREMIEERLKTYAHLFDDKVMKQLKRRRYTGWGRLSRKLINGIRDKQSGKTILDFLKSDGFANRNFMQLIHDDSLTFKEDIQKAQVSGQGDSLHEHIANLAGSPAIKKGILQTVKVVDELVKVMGRHKPENIVIEMARENQTTQKGQKNSRERMKRIEEGIKELGSQILKEHPVENTQLQNEKLYLYYLQNGRDMYVDQELDINRLSDYDVDAIVPQSFLKDDSIDNKVLTRSDKNRGKSDNVPSEEVVKKMKNYWRQLLNAKLITQRKFDNLTKAERGGLSELDKAGFIKRQLVETRQITKHVAQILDSRMNTKYDENDKLIREVKVITLKSKLVSDFRKDFQFYKVREINNYHHAHDAYLNAVVGTALIKKYPKLESEFVYGDYKVYDVRKMIAKSEQEIGKATAKYFFYSNIMNFFKTEITLANGEIRKRPLIETNGETGEIVWDKGRDFATVRKVLSMPQVNIVKKTEVQTGGFSKESILPKRNSDKLIARKKDWDPKKYGGFDSPTVAYSVLVVAKVEKGKSKKLKSVKELLGITIMERSSFEKNPIDFLEAKGYKEVKKDLIIKLPKYSLFELENGRKRMLASAGELQKGNELALPSKYVNFLYLASHYEKLKGSPEDNEQKQLFVEQHKHYLDEIIEQISEFSKRVILADANLDKVLSAYNKHRDKPIREQAENIIHLFTLTNLGAPAAFKYFDTTIDRKRYTSTKEVLDATLIHQSITGLYETRIDLSQLGGD

SEQ ID NO: 204 - protein, 345 aa, Sulfolobus islandicus
  REGION 1..345: note = MISC_FEATURE - tr|F0NN87|F0NN87_SULIHCRISPR-associatedCasx protein OS =Sulfolobus islandicus (strain HVE10/4) GN = SiH_0402 PE=4; SV = 1);CasX polypeptide sequence
MEVPLYNIFGDNYIIQVATEAENSTIYNNKVEIDDEELRNVLNLAYKIAKNNEDAAAERRGKAKKKKGEEGETTTSNIILPLSGNDKNPWTETLKCYNFPTTVALSEVFKNFSQVKECEEVSAPSFVKPEFYEFGRSPGMVERTRRVKLEVEPHYLIIAAAGWVLTRLGKAKVSEGDYVGVNVFTPTRGILYSLIQNVNGIVPGIKPETAFGLWIARKVVSSVTNPNVSVVRIYTISDAVGQNPTTINGGFSIDLTKLLEKRYLLSERLEAIARNALSISSNMRERYIVLANYIYEYLTGSKRLEDLLYFANRDLIMNLNSDDGKVRDLKLISAYVNGELIRGEG

SEQ ID NO: 205 - protein, 345 aa, Sulfolobus islandicus
  REGION 1..345: note = MISC_FEATURE - tr|F0NH53|F0NH53_SULIR CRISPR associated protein, Casx OS =Sulfolobus islandicus (strain REY15A) GN=SiRe_0771 PE=4 SV=1);CasX polypeptide sequence
MEVPLYNIFGDNYIIQVATEAENSTIYNNKVEIDDEELRNVLNLAYKIAKNNEDAAAERRGKAKKKKGEEGETTTSNIILPLSGNDKNPWTETLKCYNFPTTVALSEVFKNFSQVKECEEVSAPSFVKPEFYKFGRSPGMVERTRRVKLEVEPHYLIMAAAGWVLTRLGKAKVSEGDYVGVNVFTPTRGILYSLIQNVNGIVPGIKPETAFGLWIARKVVSSVTNPNVSVVSIYTISDAVGQNPTTINGGFSIDLTKLLEKRDLLSERLEAIARNALSISSNMRERYIVLANYIYEYLTGSKRLEDLLYFANRDLIMNLNSDDGKVRDLKLISAYVNGELIRGEG

SEQ ID NO: 206 - protein, 987 aa, unidentified
  REGION 1..987: note = MISC_FEATURE - CasX polypeptide sequence
MEKRINKIRKKLSADNATKPVSRSGPMKTLLVRVMTDDLKKRLEKRRKKPEVMPQVISNNAANNLRMLLDDYTKMKEAILQVYWQEFKDDHVGLMCKFAQPASKKIDQNKLKPEMDEKGNLTTAGFACSQCGQPLFVYKLEQVSEKGKAYTNYFGRCNVAEHEKLILLAQLKPVKDSDEAVTYSLGKFGQRALDFYSIHVTKESTHPVKPLAQIAGNRYASGPVGKALSDACMGTIASFLSKYQDIIIEHQKVVKGNQKRLESLRELAGKENLEYPSVTLPPQPHTKEGVDFAYNEVIARVRMWVNLNLWQKLKLSRDDAKPLLRLKGFPSFPVVERRENEVDWWNTINEVKKLIDAKRDMGRVFWSGVTAEKRNTILEGYNYLPNENDHKKREGSLENPKKPAKRQFGDLLLYLEKKYAGDWGKVFDEAWERIDKKIAGLTSHIEREEARNAEDAQSKAVLTDWLRAKASFVLERLKEMDEKEFYACEIQLQKWYGDLRGNPFAVEAENRVVDISGFSIGSDGHSIQYRNLLAWKYLENGKREFYLLMNYGKKGRIRFTDGTDIKKSGKWQGLLYGGGKAKVIDLTFDPDDEQLIILPLAFGTRQGREFIWNDLLSLETGLIKLANGRVIEKTIYNKKIGRDEPALFVALTFERREVVDPSNIKPVNLIGVARGENIPAVIALTDPEGCPLPEFKDSSGGPTDILRIGEGYKEKQRAIQAAKEVEQRRAGGYSRKFASKSRNLADDMVRNSARDLFYHAVTHDAVLVFANLSRGFGRQGKRTFMTERQYTKMEDWLTAKLAYEGLTSKTYLSKTLAQYTSKTCSNCGFTITYADMDVMLVRLKKTSDGWATTLNNKELKAEYQITYYNRYKRQTVEKELSAELDRLSEESGNNDISKWTKGRRDEALFLLKKRFSHRPVQEQFVCLDCGHEVHAAEQAALNIARSWLFLNSNSTEFKSYKSGKQPFVGAWQAFYKRRLKEVWKPNA

SEQ ID NO: 207 - protein, 1210 aa, unidentified
  REGION 1..1210: note = MISC_FEATURE - APG80656.1 CRISPR-associated protein CasY [uncultured Parcubacteria group bacterium]; CasY polypeptide sequence
MSKRHPRISGVKGYRLHAQRLEYTGKSGAMRTIKYPLYSSPSGGRTVPREIVSAINDDYVGLYGLSNFDDLYNAEKRNEEKVYSVLDFWYDCVQYGAVFSYTAPGLLKNVAEVRGGSYELTKTLKGSHLYDELQIDKVIKFLNKKEISRANGSLDKLKKDIIDCFKAEYRERHKDQCNKLADDIKNAKKDAGASLGERQKKLFRDFFGISEQSENDKPSFTNPLNLTCCLLPFDTVNNNRNRGEVLFNKLKEYAQKLDKNEGSLEMWEYIGIGNSGTAFSNFLGEGFLGRLRENKITELKKAMMDITDAWRGQEQEEELEKRLRILAALTIKLREPKFDNHWGGYRSDINGKLSSWLQNYINQTVKIKEDLKGHKKDLKKAKEMINRFGESDTKEEAVVSSLLESIEKIVPDDSADDEKPDIPAIAIYRRFLSDGRLTLNRFVQREDVQEALIKERLEAEKKKKPKKRKKKSDAEDEKETIDFKELFPHLAKPLKLVPNFYGDSKRELYKKYKNAAIYTDALWKAVEKIYKSAFSSSLKNSFFDTDFDKDFFIKRLQKIFSVYRRFNTDKWKPIVKNSFAPYCDIVSLAENEVLYKPKQSRSRKSAAIDKNRVRLPSTENIAKAGIALARELSVAGFDWKDLLKKEEHEEYIDLIELHKTALALLLAVTETQLDISALDFVENGTVKDFMKTRDGNLVLEGRFLEMFSQSIVFSELRGLAGLMSRKEFITRSAIQTMNGKQAELLYIPHEFQSAKITTPKEMSRAFLDLAPAEFATSLEPESLSEKSLLKLKQMRYYPHYFGYELTRTGQGIDGGVAENALRLEKSPVKKREIKCKQYKTLGRGQNKIVLYVRSSYYQTQFLEWFLHRPKNVQTDVAVSGSFLIDEKKVKTRWNYDALTVALEPVSGSERVFVSQPFTIFPEKSAEEEGQRYLGIDIGEYGIAYTALEITGDSAKILDQNFISDPQLKTLREEVKGLKLDQRRGTFAMPSTKIARIRESLVHSLRNRIHHLALKHKAKIVYELEVSRFEEGKQKIKKVYATLKKADVYSEIDADKNLQTTVWGKLAVASEISASYTSQFCGACKKLWRAEMQVDETITTQELIGTVRVIKGGTLIDAIKDFMRPPIFDENDTPFPKYRDFCDKHHISKKMRGNSCLFICPFCRANADADIQASQTIALLRYVKEEKKVEDYFERFRKLKNIKVLGQMKKI

SEQ ID NO: 208 - protein, 1082 aa, Neisseria meningitidis
  REGION 1..1082: note = MISC_FEATURE - NCBI Reference: WP_002235162.1; type II CRISPR RNA-guided endonuclease Cas9; Nme1Cas9 polypeptide sequence
MAAFKPNPINYILGLDIGIASVGWAMVEIDEDENPICLIDLGVRVFERAEVPKTGDSLAMARRLARSVRRLTRRRAHRLLRARRLLKREGVLQAADFDENGLIKSLPNTPWQLRAAALDRKLTPLEWSAVLLHLIKHRGYLSQRKNEGETADKELGALLKGVADNAHALQTGDFRTPAELALNKFEKESGHIRNQRGDYSHTFSRKDLQAELILLFEKQKEFGNPHVSGGLKEGIETLLMTQRPALSGDAVQKMLGHCTFEPAEPKAAKNTYTAERFIWLTKLNNLRILEQGSERPLTDTERATLMDEPYRKSKLTYAQARKLLGLEDTAFFKGLRYGKDNAEASTLMEMKAYHAISRALEKEGLKDKKSPLNLSPELQDEIGTAFSLFKTDEDITGRLKDRIQPEILEALLKHISFDKFVQISLKALRRIVPLMEQGKRYDEACAEIYGDHYGKKNTEEKIYLPPIPADEIRNPVVLRALSQARKVINGVVRRYGSPARIHIETAREVGKSFKDRKEIEKRQEENRKDREKAAAKFREYFPNFVGEPKSKDILKLRLYEQQHGKCLYSGKEINLGRLNEKGYVEIDHALPFSRTWDDSFNNKVLVLGSENQNKGNQTPYEYFNGKDNSREWQEFKARVETSRFPRSKKQRILLQKFDEDGFKERNLNDTRYVNRFLCQFVADRMRLTGKGKKRVFASNGQITNLLRGFWGLRKVRAENDRHHALDAVVVACSTVAMQQKITRFVRYKEMNAFDGKTIDKETGEVLHQKTHFPQPWEFFAQEVMIRVFGKPDGKPEFEEADTPEKLRTLLAEKLSSRPEAVHEYVTPLFVSRAPNRKMSGQGHMETVKSAKRLDEGVSVLRVPLTQLKLKDLEKMVNREREPKLYEALKARLEAHKDDPAKAFAEPFYKYDKAGNRTQQVKAVRVEQVQKTGVWVRNHNGIADNATMVRVDVFEKGDKYYLVPIYSWQVAKGILPDRAVVQGKDEEDWQLIDDSFNFKFSLHPNDLVEVITKKARMFGYFASCHRGTGNINIRIHDLDHKIGKNGILEGIGVKTALSFQKYQIDELGKEIRPCRLKKRPPVR

SEQ ID NO: 209 - protein, 1082 aa, Neisseria meningitidis
  REGION 1..1082: note = MISC_FEATURE - NCBI Reference: WP_002230835; type II CRISPR RNA-guided endonuclease Cas9; Nme2Cas9 polypeptide sequence
MAAFKPNPINYILGLDIGIASVGWAMVEIDEEENPIRLIDLGVRVFERAEVPKTGDSLAMARRLARSVRRLTRRRAHRLLRARRLLKREGVLQAADFDENGLIKSLPNTPWQLRAAALDRKLTPLEWSAVLLHLIKHRGYLSQRKNEGETADKELGALLKGVANNAHALQTGDFRTPAELALNKFEKESGHIRNQRGDYSHTFSRKDLQAELILLFEKQKEFGNPHVSGGLKEGIETLLMTQRPALSGDAVQKMLGHCTFEPAEPKAAKNTYTAERFIWLTKLNNLRILEQGSERPLTDTERATLMDEPYRKSKLTYAQARKLLGLEDTAFFKGLRYGKDNAEASTLMEMKAYHAISRALEKEGLKDKKSPLNLSSELQDEIGTAFSLFKTDEDITGRLKDRVQPEILEALLKHISFDKFVQISLKALRRIVPLMEQGKRYDEACAEIYGDHYGKKNTEEKIYLPPIPADEIRNPVVLRALSQARKVINGVVRRYGSPARIHIETAREVGKSFKDRKEIEKRQEENRKDREKAAAKFREYFPNFVGEPKSKDILKLRLYEQQHGKCLYSGKEINLVRLNEKGYVEIDHALPFSRTWDDSFNNKVLVLGSENQNKGNQTPYEYFNGKDNSREWQEFKARVETSRFPRSKKQRILLQKFDEDGFKECNLNDTRYVNRFLCQFVADHILLTGKGKRRVFASNGQITNLLRGFWGLRKVRAENDRHHALDAVVVACSTVAMQQKITRFVRYKEMNAFDGKTIDKETGKVLHQKTHFPQPWEFFAQEVMIRVFGKPDGKPEFEEADTPEKLRTLLAEKLSSRPEAVHEYVTPLFVSRAPNRKMSGAHKDTLRSAKRFVKHNEKISVKRVWLTEIKLADLENMVNYKNGREIELYEALKARLEAYGGNAKQAFDPKDNPFYKKGGQLVKAVRVEKTQESGVLLNKKNAYTIADNGDMVRVDVFCKVDKKGKNQYFIVPIYAWQVAENILPDIDCKGYRIDDSYTFCFSLHKYDLIAFQKDEKSKVEFAYYINCDSSNGRFYLAWHDKGSKEQQFRISTQNLVLIQKYQVNELGKEIRPCRLKKRPPVR

SEQ ID NO: 210 - protein, 1300 aa, Francisella tularensis
  REGION 1..1300: note = MISC_FEATURE - wild type Cpf1 polypeptide sequence
  source 1..1300: note = subspecies novicida
MSIYQEFVNKYSLSKTLRFELIPQGKTLENIKARGLILDDEKRAKDYKKAKQIIDKYHQFFIEEILSSVCISEDLLQNYSDVYFKLKKSDDDNLQKDFKSAKDTIKKQISEYIKDSEKFKNLFNQNLIDAKKGQESDLILWLKQSKDNGIELFKANSDITDIDEALEIIKSFKGWTTYFKGFHENRKNVYSSNDIPTSIIYRIVDDNLPKFLENKAKYESLKDKAPEAINYEQIKKDLAEELTFDIDYKTSEVNQRVFSLDEVFEIANFNNYLNQSGITKFNTIIGGKFVNGENTKRKGINEYINLYSQQINDKTLKKYKMSVLFKQILSDTESKSFVIDKLEDDSDVVTTMQSFYEQIAAFKTVEEKSIKETLSLLFDDLKAQKLDLSKIYFKNDKSLTDLSQQVFDDYSVIGTAVLEYITQQIAPKNLDNPSKKEQELIAKKTEKAKYLSLETIKLALEEFNKHRDIDKQCRFEEILANFAAIPMIFDEIAQNKDNLAQISIKYQNQGKKDLLQASAEDDVKAIKDLLDQTNNLLHKLKIFHISQSEDKANILDKDEHFYLVFEECYFELANIVPLYNKIRNYITQKPYSDEKFKLNFENSTLANGWDKNKEPDNTAILFIKDDKYYLGVMNKKNNKIFDDKAIKENKGEGYKKIVYKLLPGANKMLPKVFFSAKSIKFYNPSEDILRIRNHSTHTKNGSPQKGYEKFEFNIEDCRKFIDFYKQSISKHPEWKDFGFRFSDTQRYNSIDEFYREVENQGYKLTFENISESYIDSVVNQGKLYLFQIYNKDFSAYSKGRPNLHTLYWKALFDERNLQDVVYKLNGEAELFYRKQSIPKKITHPAKEAIANKNKDNPKKESVFEYDLIKDKRFTEDKFFFHCPITINFKSSGANKFNDEINLLLKEKANDVHILSIDRGERHLAYYTLVDGKGNIIKQDTFNIIGNDRMKTNYHDKLAAIEKDRDSARKDWKKINNIKEMKEGYLSQVVHEIAKLVIEYNAIVVFEDLNFGFKRGRFKVEKQVYQKLEKMLIEKLNYLVFKDNEFDKTGGVLRAYQLTAPFETFKKMGKQTGIIYYVPAGFTSKICPVTGFVNQLYPKYESVSKSQEFFSKFDKICYNLDKGYFEFSFDYKNFGDKAAKGKWTIASFGSRLINFRNSDKNHNWDTREVYPTKELEKLLKDYSIEYGHGECIKAAICGESDKKFFAKLTSVLNTILQMRNSKTGTELDYLISPVADVNGNFFDSRQAPKNMPQDADANGAYHIGLKGLMLLGRIKNNQEGKKLNLVIKNEEYFEFVQNRNN

SEQ ID NO: 211 - protein, 1300 aa, Francisella tularensis
  REGION 1..1300: note = MISC_FEATURE - Cpf1 D917A polypeptide sequence
  source 1..1300: note = subspecies novicida
MSIYQEFVNKYSLSKTLRFELIPQGKTLENIKARGLILDDEKRAKDYKKAKQIIDKYHQFFIEEILSSVCISEDLLQNYSDVYFKLKKSDDDNLQKDFKSAKDTIKKQISEYIKDSEKFKNLFNQNLIDAKKGQESDLILWLKQSKDNGIELFKANSDITDIDEALEIIKSFKGWTTYFKGFHENRKNVYSSNDIPTSIIYRIVDDNLPKFLENKAKYESLKDKAPEAINYEQIKKDLAEELTFDIDYKTSEVNQRVFSLDEVFEIANFNNYLNQSGITKFNTIIGGKFVNGENTKRKGINEYINLYSQQINDKTLKKYKMSVLFKQILSDTESKSFVIDKLEDDSDVVTTMQSFYEQIAAFKTVEEKSIKETLSLLFDDLKAQKLDLSKIYFKNDKSLTDLSQQVFDDYSVIGTAVLEYITQQIAPKNLDNPSKKEQELIAKKTEKAKYLSLETIKLALEEFNKHRDIDKQCRFEEILANFAAIPMIFDEIAQNKDNLAQISIKYQNQGKKDLLQASAEDDVKAIKDLLDQTNNLLHKLKIFHISQSEDKANILDKDEHFYLVFEECYFELANIVPLYNKIRNYITQKPYSDEKFKLNFENSTLANGWDKNKEPDNTAILFIKDDKYYLGVMNKKNNKIFDDKAIKENKGEGYKKIVYKLLPGANKMLPKVFFSAKSIKFYNPSEDILRIRNHSTHTKNGSPQKGYEKFEFNIEDCRKFIDFYKQSISKHPEWKDFGFRFSDTQRYNSIDEFYREVENQGYKLTFENISESYIDSVVNQGKLYLFQIYNKDFSAYSKGRPNLHTLYWKALFDERNLQDVVYKLNGEAELFYRKQSIPKKITHPAKEAIANKNKDNPKKESVFEYDLIKDKRFTEDKFFFHCPITINFKSSGANKFNDEINLLLKEKANDVHILSIARGERHLAYYTLVDGKGNIIKQDTFNIIGNDRMKTNYHDKLAAIEKDRDSARKDWKKINNIKEMKEGYLSQVVHEIAKLVIEYNAIVVFEDLNFGFKRGRFKVEKQVYQKLEKMLIEKLNYLVFKDNEFDKTGGVLRAYQLTAPFETFKKMGKQTGIIYYVPAGFTSKICPVTGFVNQLYPKYESVSKSQEFFSKFDKICYNLDKGYFEFSFDYKNFGDKAAKGKWTIASFGSRLINFRNSDKNHNWDTREVYPTKELEKLLKDYSIEYGHGECIKAAICGESDKKFFAKLTSVLNTILQMRNSKTGTELDYLISPVADVNGNFFDSRQAPKNMPQDADANGAYHIGLKGLMLLGRIKNNQEGKKLNLVIKNEEYFEFVQNRNN

SEQ ID NO: 212 - protein, 1300 aa, Francisella tularensis
  REGION 1..1300: note = MISC_FEATURE - Cpf1 E1006A polypeptide sequence
  source 1..1300: note = subspecies novicida
MSIYQEFVNKYSLSKTLRFELIPQGKTLENIKARGLILDDEKRAKDYKKAKQIIDKYHQFFIEEILSSVCISEDLLQNYSDVYFKLKKSDDDNLQKDFKSAKDTIKKQISEYIKDSEKFKNLFNQNLIDAKKGQESDLILWLKQSKDNGIELFKANSDITDIDEALEIIKSFKGWTTYFKGFHENRKNVYSSNDIPTSIIYRIVDDNLPKFLENKAKYESLKDKAPEAINYEQIKKDLAEELTFDIDYKTSEVNQRVFSLDEVFEIANFNNYLNQSGITKFNTIIGGKFVNGENTKRKGINEYINLYSQQINDKTLKKYKMSVLFKQILSDTESKSFVIDKLEDDSDVVTTMQSFYEQIAAFKTVEEKSIKETLSLLFDDLKAQKLDLSKIYFKNDKSLTDLSQQVFDDYSVIGTAVLEYITQQIAPKNLDNPSKKEQELIAKKTEKAKYLSLETIKLALEEFNKHRDIDKQCRFEEILANFAAIPMIFDEIAQNKDNLAQISIKYQNQGKKDLLQASAEDDVKAIKDLLDQTNNLLHKLKIFHISQSEDKANILDKDEHFYLVFEECYFELANIVPLYNKIRNYITQKPYSDEKFKLNFENSTLANGWDKNKEPDNTAILFIKDDKYYLGVMNKKNNKIFDDKAIKENKGEGYKKIVYKLLPGANKMLPKVFFSAKSIKFYNPSEDILRIRNHSTHTKNGSPQKGYEKFEFNIEDCRKFIDFYKQSISKHPEWKDFGFRFSDTQRYNSIDEFYREVENQGYKLTFENISESYIDSVVNQGKLYLFQIYNKDFSAYSKGRPNLHTLYWKALFDERNLQDVVYKLNGEAELFYRKQSIPKKITHPAKEAIANKNKDNPKKESVFEYDLIKDKRFTEDKFFFHCPITINFKSSGANKFNDEINLLLKEKANDVHILSIDRGERHLAYYTLVDGKGNIIKQDTFNIIGNDRMKTNYHDKLAAIEKDRDSARKDWKKINNIKEMKEGYLSQVVHEIAKLVIEYNAIVVFADLNFGFKRGRFKVEKQVYQKLEKMLIEKLNYLVFKDNEFDKTGGVLRAYQLTAPFETFKKMGKQTGIIYYVPAGFTSKICPVTGFVNQLYPKYESVSKSQEFFSKFDKICYNLDKGYFEFSFDYKNFGDKAAKGKWTIASFGSRLINFRNSDKNHNWDTREVYPTKELEKLLKDYSIEYGHGECIKAAICGESDKKFFAKLTSVLNTILQMRNSKTGTELDYLISPVADVNGNFFDSRQAPKNMPQDADANGAYHIGLKGLMLLGRIKNNQEGKKLNLVIKNEEYFEFVQNRNN

SEQ ID NO: 213 - protein, 1300 aa, Francisella tularensis
  REGION 1..1300: note = MISC_FEATURE - Cpf1 D1255A polypeptide sequence
  source 1..1300: note = subspecies novicida
MSIYQEFVNKYSLSKTLRFELIPQGKTLENIKARGLILDDEKRAKDYKKAKQIIDKYHQFFIEEILSSVCISEDLLQNYSDVYFKLKKSDDDNLQKDFKSAKDTIKKQISEYIKDSEKFKNLFNQNLIDAKKGQESDLILWLKQSKDNGIELFKANSDITDIDEALEIIKSFKGWTTYFKGFHENRKNVYSSNDIPTSIIYRIVDDNLPKFLENKAKYESLKDKAPEAINYEQIKKDLAEELTFDIDYKTSEVNQRVFSLDEVFEIANFNNYLNQSGITKFNTIIGGKFVNGENTKRKGINEYINLYSQQINDKTLKKYKMSVLFKQILSDTESKSFVIDKLEDDSDVVTTMQSFYEQIAAFKTVEEKSIKETLSLLFDDLKAQKLDLSKIYFKNDKSLTDLSQQVFDDYSVIGTAVLEYITQQIAPKNLDNPSKKEQELIAKKTEKAKYLSLETIKLALEEFNKHRDIDKQCRFEEILANFAAIPMIFDEIAQNKDNLAQISIKYQNQGKKDLLQASAEDDVKAIKDLLDQTNNLLHKLKIFHISQSEDKANILDKDEHFYLVFEECYFELANIVPLYNKIRNYITQKPYSDEKFKLNFENSTLANGWDKNKEPDNTAILFIKDDKYYLGVMNKKNNKIFDDKAIKENKGEGYKKIVYKLLPGANKMLPKVFFSAKSIKFYNPSEDILRIRNHSTHTKNGSPQKGYEKFEFNIEDCRKFIDFYKQSISKHPEWKDFGFRFSDTQRYNSIDEFYREVENQGYKLTFENISESYIDSVVNQGKLYLFQIYNKDFSAYSKGRPNLHTLYWKALFDERNLQDVVYKLNGEAELFYRKQSIPKKITHPAKEAIANKNKDNPKKESVFEYDLIKDKRFTEDKFFFHCPITINFKSSGANKFNDEINLLLKEKANDVHILSIDRGERHLAYYTLVDGKGNIIKQDTFNIIGNDRMKTNYHDKLAAIEKDRDSARKDWKKINNIKEMKEGYLSQVVHEIAKLVIEYNAIVVFEDLNFGFKRGRFKVEKQVYQKLEKMLIEKLNYLVFKDNEFDKTGGVLRAYQLTAPFETFKKMGKQTGIIYYVPAGFTSKICPVTGFVNQLYPKYESVSKSQEFFSKFDKICYNLDKGYFEFSFDYKNFGDKAAKGKWTIASFGSRLINFRNSDKNHNWDTREVYPTKELEKLLKDYSIEYGHGECIKAAICGESDKKFFAKLTSVLNTILQMRNSKTGTELDYLISPVADVNGNFFDSRQAPKNMPQDAAANGAYHIGLKGLMLLGRIKNNQEGKKLNLVIKNEEYFEFVQNRNN

SEQ ID NO: 214 - protein, 1300 aa, Francisella tularensis
  REGION 1..1300: note = MISC_FEATURE - Cpf1 D917A/E1006A polypeptide sequence
  source 1..1300: note = subspecies novicida
MSIYQEFVNKYSLSKTLRFELIPQGKTLENIKARGLILDDEKRAKDYKKAKQIIDKYHQFFIEEILSSVCISEDLLQNYSDVYFKLKKSDDDNLQKDFKSAKDTIKKQISEYIKDSEKFKNLFNQNLIDAKKGQESDLILWLKQSKDNGIELFKANSDITDIDEALEIIKSFKGWTTYFKGFHENRKNVYSSNDIPTSIIYRIVDDNLPKFLENKAKYESLKDKAPEAINYEQIKKDLAEELTFDIDYKTSEVNQRVFSLDEVFEIANFNNYLNQSGITKFNTIIGGKFVNGENTKRKGINEYINLYSQQINDKTLKKYKMSVLFKQILSDTESKSFVIDKLEDDSDVVTTMQSFYEQIAAFKTVEEKSIKETLSLLFDDLKAQKLDLSKIYFKNDKSLTDLSQQVFDDYSVIGTAVLEYITQQIAPKNLDNPSKKEQELIAKKTEKAKYLSLETIKLALEEFNKHRDIDKQCRFEEILANFAAIPMIFDEIAQNKDNLAQISIKYQNQGKKDLLQASAEDDVKAIKDLLDQTNNLLHKLKIFHISQSEDKANILDKDEHFYLVFEECYFELANIVPLYNKIRNYITQKPYSDEKFKLNFENSTLANGWDKNKEPDNTAILFIKDDKYYLGVMNKKNNKIFDDKAIKENKGEGYKKIVYKLLPGANKMLPKVFFSAKSIKFYNPSEDILRIRNHSTHTKNGSPQKGYEKFEFNIEDCRKFIDFYKQSISKHPEWKDFGFRFSDTQRYNSIDEFYREVENQGYKLTFENISESYIDSVVNQGKLYLFQIYNKDFSAYSKGRPNLHTLYWKALFDERNLQDVVYKLNGEAELFYRKQSIPKKITHPAKEAIANKNKDNPKKESVFEYDLIKDKRFTEDKFFFHCPITINFKSSGANKFNDEINLLLKEKANDVHILSIARGERHLAYYTLVDGKGNIIKQDTFNIIGNDRMKTNYHDKLAAIEKDRDSARKDWKKINNIKEMKEGYLSQVVHEIAKLVIEYNAIVVFADLNFGFKRGRFKVEKQVYQKLEKMLIEKLNYLVFKDNEFDKTGGVLRAYQLTAPFETFKKMGKQTGIIYYVPAGFTSKICPVTGFVNQLYPKYESVSKSQEFFSKFDKICYNLDKGYFEFSFDYKNFGDKAAKGKWTIASFGSRLINFRNSDKNHNWDTREVYPTKELEKLLKDYSIEYGHGECIKAAICGESDKKFFAKLTSVLNTILQMRNSKTGTELDYLISPVADVNGNFFDSRQAPKNMPQDADANGAYHIGLKGLMLLGRIKNNQEGKKLNLVIKNEEYFEFVQNRNN

SEQ ID NO: 215 - protein, 1300 aa, Francisella tularensis
  REGION 1..1300: note = MISC_FEATURE - Cpf1 D917A/D1255A polypeptide sequence
  source 1..1300: note = subspecies novicida
MSIYQEFVNKYSLSKTLRFELIPQGKTLENIKARGLILDDEKRAKDYKKAKQIIDKYHQFFIEEILSSVCISEDLLQNYSDVYFKLKKSDDDNLQKDFKSAKDTIKKQISEYIKDSEKFKNLFNQNLIDAKKGQESDLILWLKQSKDNGIELFKANSDITDIDEALEIIKSFKGWTTYFKGFHENRKNVYSSNDIPTSIIYRIVDDNLPKFLENKAKYESLKDKAPEAINYEQIKKDLAEELTFDIDYKTSEVNQRVFSLDEVFEIANFNNYLNQSGITKFNTIIGGKFVNGENTKRKGINEYINLYSQQINDKTLKKYKMSVLFKQILSDTESKSFVIDKLEDDSDVVTTMQSFYEQIAAFKTVEEKSIKETLSLLFDDLKAQKLDLSKIYFKNDKSLTDLSQQVFDDYSVIGTAVLEYITQQIAPKNLDNPSKKEQELIAKKTEKAKYLSLETIKLALEEFNKHRDIDKQCRFEEILANFAAIPMIFDEIAQNKDNLAQISIKYQNQGKKDLLQASAEDDVKAIKDLLDQTNNLLHKLKIFHISQSEDKANILDKDEHFYLVFEECYFELANIVPLYNKIRNYITQKPYSDEKFKLNFENSTLANGWDKNKEPDNTAILFIKDDKYYLGVMNKKNNKIFDDKAIKENKGEGYKKIVYKLLPGANKMLPKVFFSAKSIKFYNPSEDILRIRNHSTHTKNGSPQKGYEKFEFNIEDCRKFIDFYKQSISKHPEWKDFGFRFSDTQRYNSIDEFYREVENQGYKLTFENISESYIDSVVNQGKLYLFQIYNKDFSAYSKGRPNLHTLYWKALFDERNLQDVVYKLNGEAELFYRKQSIPKKITHPAKEAIANKNKDNPKKESVFEYDLIKDKRFTEDKFFFHCPITINFKSSGANKFNDEINLLLKEKANDVHILSIARGERHLAYYTLVDGKGNIIKQDTFNIIGNDRMKTNYHDKLAAIEKDRDSARKDWKKINNIKEMKEGYLSQVVHEIAKLVIEYNAIVVFEDLNFGFKRGRFKVEKQVYQKLEKMLIEKLNYLVFKDNEFDKTGGVLRAYQLTAPFETFKKMGKQTGIIYYVPAGFTSKICPVTGFVNQLYPKYESVSKSQEFFSKFDKICYNLDKGYFEFSFDYKNFGDKAAKGKWTIASFGSRLINFRNSDKNHNWDTREVYPTKELEKLLKDYSIEYGHGECIKAAICGESDKKFFAKLTSVLNTILQMRNSKTGTELDYLISPVADVNGNFFDSRQAPKNMPQDAAANGAYHIGLKGLMLLGRIKNNQEGKKLNLVIKNEEYFEFVQNRNN

SEQ ID NO: 216 - protein, 1300 aa, Francisella tularensis
  REGION 1..1300: note = MISC_FEATURE - Cpf1 E1006A/D1255A polypeptide sequence
  source 1..1300: note = subspecies novicida
MSIYQEFVNKYSLSKTLRFELIPQGKTLENIKARGLILDDEKRAKDYKKAKQIIDKYHQFFIEEILSSVCISEDLLQNYSDVYFKLKKSDDDNLQKDFKSAKDTIKKQISEYIKDSEKFKNLFNQNLIDAKKGQESDLILWLKQSKDNGIELFKANSDITDIDEALEIIKSFKGWTTYFKGFHENRKNVYSSNDIPTSIIYRIVDDNLPKFLENKAKYESLKDKAPEAINYEQIKKDLAEELTFDIDYKTSEVNQRVFSLDEVFEIANFNNYLNQSGITKFNTIIGGKFVNGENTKRKGINEYINLYSQQINDKTLKKYKMSVLFKQILSDTESKSFVIDKLEDDSDVVTTMQSFYEQIAAFKTVEEKSIKETLSLLFDDLKAQKLDLSKIYFKNDKSLTDLSQQVFDDYSVIGTAVLEYITQQIAPKNLDNPSKKEQELIAKKTEKAKYLSLETIKLALEEFNKHRDIDKQCRFEEILANFAAIPMIFDEIAQNKDNLAQISIKYQNQGKKDLLQASAEDDVKAIKDLLDQTNNLLHKLKIFHISQSEDKANILDKDEHFYLVFEECYFELANIVPLYNKIRNYITQKPYSDEKFKLNFENSTLANGWDKNKEPDNTAILFIKDDKYYLGVMNKKNNKIFDDKAIKENKGEGYKKIVYKLLPGANKMLPKVFFSAKSIKFYNPSEDILRIRNHSTHTKNGSPQKGYEKFEFNIEDCRKFIDFYKQSISKHPEWKDFGFRFSDTQRYNSIDEFYREVENQGYKLTFENISESYIDSVVNQGKLYLFQIYNKDFSAYSKGRPNLHTLYWKALFDERNLQDVVYKLNGEAELFYRKQSIPKKITHPAKEAIANKNKDNPKKESVFEYDLIKDKRFTEDKFFFHCPITINFKSSGANKFNDEINLLLKEKANDVHILSIDRGERHLAYYTLVDGKGNIIKQDTFNIIGNDRMKTNYHDKLAAIEKDRDSARKDWKKINNIKEMKEGYLSQVVHEIAKLVIEYNAIVVFADLNFGFKRGRFKVEKQVYQKLEKMLIEKLNYLVFKDNEFDKTGGVLRAYQLTAPFETFKKMGKQTGIIYYVPAGFTSKICPVTGFVNQLYPKYESVSKSQEFFSKFDKICYNLDKGYFEFSFDYKNFGDKAAKGKWTIASFGSRLINFRNSDKNHNWDTREVYPTKELEKLLKDYSIEYGHGECIKAAICGESDKKFFAKLTSVLNTILQMRNSKTGTELDYLISPVADVNGNFFDSRQAPKNMPQDAAANGAYHIGLKGLMLLGRIKNNQEGKKLNLVIKNEEYFEFVQNRNN

SEQ ID NO: 217 - protein, 1300 aa, Francisella tularensis
  REGION 1..1300: note = MISC_FEATURE - Cpf1 D917A/E1006A/D1255A polypeptide sequence
  source 1..1300: note = subspecies novicida
MSIYQEFVNKYSLSKTLRFELIPQGKTLENIKARGLILDDEKRAKDYKKAKQIIDKYHQFFIEEILSSVCISEDLLQNYSDVYFKLKKSDDDNLQKDFKSAKDTIKKQISEYIKDSEKFKNLFNQNLIDAKKGQESDLILWLKQSKDNGIELFKANSDITDIDEALEIIKSFKGWTTYFKGFHENRKNVYSSNDIPTSIIYRIVDDNLPKFLENKAKYESLKDKAPEAINYEQIKKDLAEELTFDIDYKTSEVNQRVFSLDEVFEIANFNNYLNQSGITKFNTIIGGKFVNGENTKRKGINEYINLYSQQINDKTLKKYKMSVLFKQILSDTESKSFVIDKLEDDSDVVTTMQSFYEQIAAFKTVEEKSIKETLSLLFDDLKAQKLDLSKIYFKNDKSLTDLSQQVFDDYSVIGTAVLEYITQQIAPKNLDNPSKKEQELIAKKTEKAKYLSLETIKLALEEFNKHRDIDKQCRFEEILANFAAIPMIFDEIAQNKDNLAQISIKYQNQGKKDLLQASAEDDVKAIKDLLDQTNNLLHKLKIFHISQSEDKANILDKDEHFYLVFEECYFELANIVPLYNKIRNYITQKPYSDEKFKLNFENSTLANGWDKNKEPDNTAILFIKDDKYYLGVMNKKNNKIFDDKAIKENKGEGYKKIVYKLLPGANKMLPKVFFSAKSIKFYNPSEDILRIRNHSTHTKNGSPQKGYEKFEFNIEDCRKFIDFYKQSISKHPEWKDFGFRFSDTQRYNSIDEFYREVENQGYKLTFENISESYIDSVVNQGKLYLFQIYNKDFSAYSKGRPNLHTLYWKALFDERNLQDVVYKLNGEAELFYRKQSIPKKITHPAKEAIANKNKDNPKKESVFEYDLIKDKRFTEDKFFFHCPITINFKSSGANKFNDEINLLLKEKANDVHILSIARGERHLAYYTLVDGKGNIIKQDTFNIIGNDRMKTNYHDKLAAIEKDRDSARKDWKKINNIKEMKEGYLSQVVHEIAKLVIEYNAIVVFADLNFGFKRGRFKVEKQVYQKLEKMLIEKLNYLVFKDNEFDKTGGVLRAYQLTAPFETFKKMGKQTGIIYYVPAGFTSKICPVTGFVNQLYPKYESVSKSQEFFSKFDKICYNLDKGYFEFSFDYKNFGDKAAKGKWTIASFGSRLINFRNSDKNHNWDTREVYPTKELEKLLKDYSIEYGHGECIKAAICGESDKKFFAKLTSVLNTILQMRNSKTGTELDYLISPVADVNGNFFDSRQAPKNMPQDAAANGAYHIGLKGLMLLGRIKNNQEGKKLNLVIKNEEYFEFVQNRNN

SEQ ID NO: 218 - protein, 1052 aa, Staphylococcus aureus
  REGION 1..1052: note = MISC_FEATURE - Exemplary SaCas9 polypeptide sequence
KRNYILGLDIGITSVGYGIIDYETRDVIDAGVRLFKEANVENNEGRRSKRGARRLKRRRRHRIQRVKKLLFDYNLLTDHSELSGINPYEARVKGLSQKLSEEEFSAALLHLAKRRGVHNVNEVEEDTGNELSTKEQISRNSKALEEKYVAELQLERLKKDGEVRGSINRFKTSDYVKEAKQLLKVQKAYHQLDQSFIDTYIDLLETRRTYYEGPGEGSPFGWKDIKEWYEMLMGHCTYFPEELRSVKYAYNADLYNALNDLNNLVITRDENEKLEYYEKFQIIENVFKQKKKPTLKQIAKEILVNEEDIKGYRVTSTGKPEFTNLKVYHDIKDITARKEIIENAELLDQIAKILTIYQSSEDIQEELTNLNSELTQEEIEQISNLKGYTGTHNLSLKAINLILDELWHTNDNQIAIFNRLKLVPKKVDLSQQKEIPTTLVDDFILSPVVKRSFIQSIKVINAIIKKYGLPNDIIIELAREKNSKDAQKMINEMQKRNRQTNERIEEIIRTTGKENAKYLIEKIKLHDMQEGKCLYSLEAIPLEDLLNNPFNYEVDHIIPRSVSFDNSFNNKVLVKQEENSKKGNRTPFQYLSSSDSKISYETFKKHILNLAKGKGRISKTKKEYLLEERDINRFSVQKDFINRNLVDTRYATRGLMNLLRSYFRVNNLDVKVKSINGGFTSFLRRKWKFKKERNKGYKHHAEDALIIANADFIFKEWKKLDKAKKVMENQMFEEKQAESMPEIETEQEYKEIFITPHQIKHIKDFKDYKYSHRVDKKPNRELINDTLYSTRKDDKGNTLIVNNLNGLYDKDNDKLKKLINKSPEKLLMYHHDPQTYQKLKLIMEQYGDEKNPLYKYYEETGNYLTKYSKKDNGPVIKKIKYYGNKLNAHLDITDDYPNSRNKVVKLSLKPYRFDVYLDNGVYKFVTVKNLDVIKKENYYEVNSKCYEEAKKLKKISNQAEFIASFYNNDLIKINGELYRVIGVNNDLLNRIEVNMIDITYREYLENMNDKRPPRIIKTIASKTQSIKKYSTDILGNLYEVKSKKHPQIIKKG

SEQ ID NO: 219 - protein, 1052 aa, Staphylococcus aureus
  REGION 1..1052: note = MISC_FEATURE - SaCas9n polypeptide sequence
KRNYILGLDIGITSVGYGIIDYETRDVIDAGVRLFKEANVENNEGRRSKRGARRLKRRRRHRIQRVKKLLFDYNLLTDHSELSGINPYEARVKGLSQKLSEEEFSAALLHLAKRRGVHNVNEVEEDTGNELSTKEQISRNSKALEEKYVAELQLERLKKDGEVRGSINRFKTSDYVKEAKQLLKVQKAYHQLDQSFIDTYIDLLETRRTYYEGPGEGSPFGWKDIKEWYEMLMGHCTYFPEELRSVKYAYNADLYNALNDLNNLVITRDENEKLEYYEKFQIIENVFKQKKKPTLKQIAKEILVNEEDIKGYRVTSTGKPEFTNLKVYHDIKDITARKEIIENAELLDQIAKILTIYQSSEDIQEELTNLNSELTQEEIEQISNLKGYTGTHNLSLKAINLILDELWHTNDNQIAIFNRLKLVPKKVDLSQQKEIPTTLVDDFILSPVVKRSFIQSIKVINAIIKKYGLPNDIIIELAREKNSKDAQKMINEMQKRNRQTNERIEEIIRTTGKENAKYLIEKIKLHDMQEGKCLYSLEAIPLEDLLNNPFNYEVDHIIPRSVSFDNSFNNKVLVKQEEASKKGNRTPFQYLSSSDSKISYETFKKHILNLAKGKGRISKTKKEYLLEERDINRFSVQKDFINRNLVDTRYATRGLMNLLRSYFRVNNLDVKVKSINGGFTSFLRRKWKFKKERNKGYKHHAEDALIIANADFIFKEWKKLDKAKKVMENQMFEEKQAESMPEIETEQEYKEIFITPHQIKHIKDFKDYKYSHRVDKKPNRELINDTLYSTRKDDKGNTLIVNNLNGLYDKDNDKLKKLINKSPEKLLMYHHDPQTYQKLKLIMEQYGDEKNPLYKYYEETGNYLTKYSKKDNGPVIKKIKYYGNKLNAHLDITDDYPNSRNKVVKLSLKPYRFDVYLDNGVYKFVTVKNLDVIKKENYYEVNSKCYEEAKKLKKISNQAEFIASFYNNDLIKINGELYRVIGVNNDLLNRIEVNMIDITYREYLENMNDKRPPRIIKTIASKTQSIKKYSTDILGNLYEVKSKKHPQIIKKG

SEQ ID NO: 220 - protein, 1052 aa, Staphylococcus aureus
  REGION 1..1052: note = MISC_FEATURE - SaKKH Cas9 polypeptide sequence
KRNYILGLDIGITSVGYGIIDYETRDVIDAGVRLFKEANVENNEGRRSKRGARRLKRRRRHRIQRVKKLLFDYNLLTDHSELSGINPYEARVKGLSQKLSEEEFSAALLHLAKRRGVHNVNEVEEDTGNELSTKEQISRNSKALEEKYVAELQLERLKKDGEVRGSINRFKTSDYVKEAKQLLKVQKAYHQLDQSFIDTYIDLLETRRTYYEGPGEGSPFGWKDIKEWYEMLMGHCTYFPEELRSVKYAYNADLYNALNDLNNLVITRDENEKLEYYEKFQIIENVFKQKKKPTLKQIAKEILVNEEDIKGYRVTSTGKPEFTNLKVYHDIKDITARKEIIENAELLDQIAKILTIYQSSEDIQEELTNLNSELTQEEIEQISNLKGYTGTHNLSLKAINLILDELWHTNDNQIAIFNRLKLVPKKVDLSQQKEIPTTLVDDFILSPVVKRSFIQSIKVINAIIKKYGLPNDIIIELAREKNSKDAQKMINEMQKRNRQTNERIEEIIRTTGKENAKYLIEKIKLHDMQEGKCLYSLEAIPLEDLLNNPFNYEVDHIIPRSVSFDNSFNNKVLVKQEEASKKGNRTPFQYLSSSDSKISYETFKKHILNLAKGKGRISKTKKEYLLEERDINRFSVQKDFINRNLVDTRYATRGLMNLLRSYFRVNNLDVKVKSINGGFTSFLRRKWKFKKERNKGYKHHAEDALIIANADFIFKEWKKLDKAKKVMENQMFEEKQAESMPEIETEQEYKEIFITPHQIKHIKDFKDYKYSHRVDKKPNRKLINDTLYSTRKDDKGNTLIVNNLNGLYDKDNDKLKKLINKSPEKLLMYHHDPQTYQKLKLIMEQYGDEKNPLYKYYEETGNYLTKYSKKDNGPVIKKIKYYGNKLNAHLDITDDYPNSRNKVVKLSLKPYRFDVYLDNGVYKFVTVKNLDVIKKENYYEVNSKCYEEAKKLKKISNQAEFIASFYKNDLIKINGELYRVIGVNNDLLNRIEVNMIDITYREYLENMNDKRPPHIIKTIASKTQSIKKYSTDILGNLYEVKSKKHPQIIKKG

SEQ ID NO: 221 - protein, 707 aa, synthetic construct
  REGION 1..707: note = Casphi-1 polypeptide sequence
MADTPTLFTQFLRHHLPGQRFRKDILKQAGRILANKGEDATIAFLRGKSEESPPDFQPPVKCPIIACSRPLTEWPIYQASVAIQGYVYGQSLAEFEASDPGCSKDGLLGWFDKTGVCTDYFSVQGLNLIFQNARKRYIGVQTKVTNRNEKRHKKLKRINAKRIAEGLPELTSDEPESALDETGHLIDPPGLNTNIYCYQQVSPKPLALSEVNQLPTAYAGYSTSGDDPIQPMVTKDRLSISKGQPGYIPEHQRALLSQKKHRRMRGYGLKARALLVIVRIQDDWAVIDLRSLLRNAYWRRIVQTKEPSTITKLLKLVTGDPVLDATRMVATFTYKPGIVQVRSAKCLKNKQGSKLFSERYLNETVSVTSIDLGSNNLVAVATYRLVNGNTPELLQRFTLPSHLVKDFERYKQAHDTLEDSIQKTAVASLPQGQQTEIRMWSMYGFREAQERVCQELGLADGSIPWNVMTATSTILTDLFLARGGDPKKCMFTSEPKKKKNSKQVLYKIRDRAWAKMYRTLLSKETREAWNKALWGLKRGSPDYARLSKRKEELARRCVNYTISTAEKRAQCGRTIVALEDLNIGFFHGRGKQEPGWVGLFTRKKENRWLMQALHKAFLELAHHRGYHVIEVNPAYTSQTCPVCRHCDPDNRDQHNREAFHCIGCGFRGNADLDVATHNIAMVAITGESLKRARGSVASKTPQPLAAE

SEQ ID NO: 222 - protein, 757 aa, synthetic construct
  REGION 1..757: note = Casphi-2 polypeptide sequence
MPKPAVESEFSKVLKKHFPGERFRSSYMKRGGKILAAQGEEAVVAYLQGKSEEEPPNFQPPAKCHVVTKSRDFAEWPIMKASEAIQRYIYALSTTERAACKPGKSSESHAAWFAATGVSNHGYSHVQGLNLIFDHTLGRYDGVLKKVQLRNEKARARLESINASRADEGLPEIKAEEEEVATNETGHLLQPPGINPSFYVYQTISPQAYRPRDEIVLPPEYAGYVRDPNAPIPLGVVRNRCDIQKGCPGYIPEWQREAGTAISPKTGKAVTVPGLSPKKNKRMRRYWRSEKEKAQDALLVTVRIGTDWVVIDVRGLLRNARWRTIAPKDISLNALLDLFTGDPVIDVRRNIVTFTYTLDACGTYARKWTLKGKQTKATLDKLTATQTVALVAIDLGQTNPISAGISRVTQENGALQCEPLDRFTLPDDLLKDISAYRIAWDRNEEELRARSVEALPEAQQAEVRALDGVSKETARTQLCADFGLDPKRLPWDKMSSNTTFISEALLSNSVSRDQVFFTPAPKKGAKKKAPVEVMRKDRTWARAYKPRLSVEAQKLKNEALWALKRTSPEYLKLSRRKEELCRRSINYVIEKTRRRTQCQIVIPVIEDLNVRFFHGSGKRLPGWDNFFTAKKENRWFIQGLHKAFSDLRTHRSFYVFEVRPERTSITCPKCGHCEVGNRDGEAFQCLSCGKTCNADLDVATHNLTQVALTGKTMPKREEPRDAQGTAPARKTKKASKSKAPPAEREDQTPAQEPSQTS

SEQ ID NO: 223 - protein, 766 aa, synthetic construct
  REGION 1..766: note = Casphi-3 polypeptide sequence
MEKEITELTKIRREFPNKKFSSTDMKKAGKLLKAEGPDAVRDFLNSCQEIIGDFKPPVKTNIVSISRPFEEWPVSMVGRAIQEYYFSLTKEELESVHPGTSSEDHKSFFNITGLSNYNYTSVQGLNLIFKNAKAIYDGTLVKANNKNKKLEKKFNEINHKRSLEGLPIITPDFEEPFDENGHLNNPPGINRNIYGYQGCAAKVFVPSKHKMVSLPKEYEGYNRDPNLSLAGFRNRLEIPEGEPGHVPWFQRMDIPEGQIGHVNKIQRFNFVHGKNSGKVKFSDKTGRVKRYHHSKYKDATKPYKFLEESKKVSALDSILAIITIGDDWVVFDIRGLYRNVFYRELAQKGLTAVQLLDLFTGDPVIDPKKGVVTFSYKEGVVPVFSQKIVPRFKSRDTLEKLTSQGPVALLSVDLGQNEPVAARVCSLKNINDKITLDNSCRISFLDDYKKQIKDYRDSLDELEIKIRLEAINSLETNQQVEIRDLDVFSADRAKANTVDMFDIDPNLISWDSMSDARVSTQISDLYLKNGGDESRVYFEINNKRIKRSDYNISQLVRPKLSDSTRKNLNDSIWKLKRTSEEYLKLSKRKLELSRAVVNYTIRQSKLLSGINDIVIILEDLDVKKKFNGRGIRDIGWDNFFSSRKENRWFIPAFHKAFSELSSNRGLCVIEVNPAWTSATCPDCGFCSKENRDGINFTCRKCGVSYHADIDVATLNIARVAVLGKPMSGPADRERLGDTKKPRVARSRKTMKRKDISNSTVEAMVTA

SEQ ID NO: 224 - protein, 765 aa, synthetic construct
  REGION 1..765: note = Casphi-4 polypeptide sequence
MYSLEMADLKSEPSLLAKLLRDRFPGKYWLPKYWKLAEKKRLTGGEEAACEYMADKQLDSPPPNFRPPARCVILAKSRPFEDWPVHRVASKAQSFVIGLSEQGFAALRAAPPSTADARRDWLRSHGASEDDLMALEAQLLETIMGNAISLHGGVLKKIDNANVKAAKRLSGRNEARLNKGLQELPPEQEGSAYGADGLLVNPPGLNLNIYCRKSCCPKPVKNTARFVGHYPGYLRDSDSILISGTMDRLTIIEGMPGHIPAWQREQGLVKPGGRRRRLSGSESNMRQKVDPSTGPRRSTRSGTVNRSNQRTGRNGDPLLVEIRMKEDWVLLDARGLLRNLRWRESKRGLSCDHEDLSLSGLLALFSGDPVIDPVRNEVVFLYGEGIIPVRSTKPVGTRQSKKLLERQASMGPLTLISCDLGQTNLIAGRASAISLTHGSLGVRSSVRIELDPEIIKSFERLRKDADRLETEILTAAKETLSDEQRGEVNSHEKDSPQTAKASLCRELGLHPPSLPWGQMGPSTTFIADMLISHGRDDDAFLSHGEFPTLEKRKKFDKRFCLESRPLLSSETRKALNESLWEVKRTSSEYARLSQRKKEMARRAVNFVVEISRRKTGLSNVIVNIEDLNVRIFHGGGKQAPGWDGFFRPKSENRWFIQAIHKAFSDLAAHHGIPVIESDPQRTSMTCPECGHCDSKNRNGVRFLCKGCGASMDADFDAACRNLERVALTGKPMPKPSTSCERLLSATTGKVCSDHSLSHDAIEKAS

SEQ ID NO: 225 - protein, 793 aa, synthetic construct
  REGION 1..793: note = Casphi-5 polypeptide sequence
MSSLPTPLELLKQKHADLFKGLQFSSKDNKMAGKVLKKDGEEAALAFLSERGVSRGELPNFRPPAKTLVVAQSRPFEEFPIYRVSEAIQLYVYSLSVKELETVPSGSSTKKEHQRFFQDSSVPDFGYTSVQGLNKIFGLARGIYLGVITRGENQLQKAKSKHEALNKKRRASGEAETEFDPTPYEYMTPERKLAKPPGVNHSIMCYVDISVDEFDFRNPDGIVLPSEYAGYCREINTAIEKGTVDRLGHLKGGPGYIPGHQRKESTTEGPKINFRKGRIRRSYTALYAKRDSRRVRQGKLALPSYRHHMMRLNSNAESAILAVIFFGKDWVVFDLRGLLRNVRWRNLFVDGSTPSTLLGMFGDPVIDPKRGVVAFCYKEQIVPVVSKSITKMVKAPELLNKLYLKSEDPLVLVAIDLGQTNPVGVGVYRVMNASLDYEVVTRFALESELLREIESYRQRTNAFEAQIRAETFDAMTSEEQEEITRVRAFSASKAKENVCHRFGMPVDAVDWATMGSNTIHIAKWVMRHGDPSLVEVLEYRKDNEIKLDKNGVPKKVKLTDKRIANLTSIRLRFSQETSKHYNDTMWELRRKHPVYQKLSKSKADFSRRVVNSIIRRVNHLVPRARIVFIIEDLKNLGKVFHGSGKRELGWDSYFEPKSENRWFIQVLHKAFSETGKHKGYYIIECWPNWTSCTCPKCSCCDSENRHGEVFRCLACGYTCNTDFGTAPDNLVKIATTGKGLPGPKKRCKGSSKGKNPKIARSSETGVSVTESGAPKVKKSSPTQTSQSSSQSAP

SEQ ID NO: 226 - protein, 441 aa, synthetic construct
  REGION 1..441: note = Casphi-6 polypeptide sequence
MNKIEKEKTPLAKLMNENFAGLRFPFAIIKQAGKKLLKEGELKTIEYMTGKGSIEPLPNFKPPVKCLIVAKRRDLKYFPICKASCEIQSYVYSLNYKDFMDYFSTPMTSQKQHEEFFKKSGLNIEYQNVAGLNLIFNNVKNTYNGVILKVKNRNEKLKKKAIKNNYEFEEIKTFNDDGCLINKPGINNVIYCFQSISPKILKNITHLPKEYNDYDCSVDRNIIQKYVSRLDIPESQPGHVPEWQRKLPEFNNTNNPRRRRKWYSNGRNISKGYSVDQVNQAKIEDSLLAQIKIGEDWIILDIRGLLRDLNRRELISYKNKLTIKDVLGFFSDYPIIDIKKNLVTFCYKEGVIQVVSQKSIGNKKSKQLLEKLIENKPIALVSIDLGQTNPVSVKISKLNKINNKISIESFTYRFLNEEILKEIEKYRKDYDKLELKLINEA

SEQ ID NO: 227 - protein, 772 aa, synthetic construct
  REGION 1..772: note = Casphi-7 polypeptide sequence
MSNTAVSTREHMSNKTTPPSPLSLLLRAHFPGLKFESQDYKIAGKKLRDGGPEAVISYLTGKGQAKLKDVKPPAKAFVIAQSRPFIEWDLVRVSRQIQEKIFGIPATKGRPKQDGLSETAFNEAVASLEVDGKSKLNEETRAAFYEVLGLDAPSLHAQAQNALIKSAISIREGVLKKVENRNEKNLSKTKRRKEAGEEATFVEEKAHDERGYLIHPPGVNQTIPGYQAVVIKSCPSDFIGLPSGCLAKESAEALTDYLPHDRMTIPKGQPGYVPEWQHPLLNRRKNRRRRDWYSASLNKPKATCSKRSGTPNRKNSRTDQIQSGRFKGAIPVLMRFQDEWVIIDIRGLLRNARYRKLLKEKSTIPDLLSLFTGDPSIDMRQGVCTFIYKAGQACSAKMVKTKNAPEILSELTKSGPVVLVSIDLGQTNPIAAKVSRVTQLSDGQLSHETLLRELLSNDSSDGKEIARYRVASDRLRDKLANLAVERLSPEHKSEILRAKNDTPALCKARVCAALGLNPEMIAWDKMTPYTEFLATAYLEKGGDRKVATLKPKNRPEMLRRDIKFKGTEGVRIEVSPEAAEAYREAQWDLQRTSPEYLRLSTWKQELTKRILNQLRHKAAKSSQCEVVVMAFEDLNIKMMHGNGKWADGGWDAFFIKKRENRWFMQAFHKSLTELGAHKGVPTIEVTPHRTSITCTKCGHCDKANRDGERFACQKCGFVAHADLEIATDNIERVALTGKPMPKPESERSGDAKKSVGARKAAFKPEEDAEAAE

SEQ ID NO: 228 - protein, 717 aa, synthetic construct
  REGION 1..717: note = Casphi-8 polypeptide sequence
MIKPTVSQFLTPGFKLIRNHSRTAGLKLKNEGEEACKKFVRENEIPKDECPNFQGGPAIANIIAKSREFTEWEIYQSSLAIQEVIFTLPKDKLPEPILKEEWRAQWLSEHGLDTVPYKEAAGLNLIIKNAVNTYKGVQVKVDNKNKNNLAKINRKNEIAKLNGEQEISFEEIKAFDDKGYLLQKPSPNKSIYCYQSVSPKPFITSKYHNVNLPEEYIGYYRKSNEPIVSPYQFDRLRIPIGEPGYVPKWQYTFLSKKENKRRKLSKRIKNVSPILGIICIKKDWCVFDMRGLLRTNHWKKYHKPTDSINDLFDYFTGDPVIDTKANVVRFRYKMENGIVNYKPVREKKGKELLENICDQNGSCKLATVDVGQNNPVAIGLFELKKVNGELTKTLISRHPTPIDFCNKITAYRERYDKLESSIKLDAIKQLTSEQKIEVDNYNNNFTPQNTKQIVCSKLNINPNDLPWDKMISGTHFISEKAQVSNKSEIYFTSTDKGKTKDVMKSDYKWFQDYKPKLSKEVRDALSDIEWRLRRESLEFNKLSKSREQDARQLANWISSMCDVIGIENLVKKNNFFGGSGKREPGWDNFYKPKKENRWWINAIHKALTELSQNKGKRVILLPAMRTSITCPKCKYCDSKNRNGEKFNCLKCGIELNADIDVATENLATVAITAQSMPKPTCERSGDAKKPVRARKAKAPEFHDKLAPSYTVVLREAV

SEQ ID NO: 229 - protein, 793 aa, synthetic construct
  REGION 1..793: note = Casphi-9 polypeptide sequence
MRSSREIGDKILMRQPAEKTAFQVFRQEVIGTQKLSGGDAKTAGRLYKQGKMEAAREWLLKGARDDVPPNFQPPAKCLVVAVSHPFEEWDISKTNHDVQAYIYAQPLQAEGHLNGLSEKWEDTSADQHKLWFEKTGVPDRGLPVQAINKIAKAAVNRAFGVVRKVENRNEKRRSRDNRIAEHNRENGLTEVVREAPEVATNADGFLLHPPGIDPSILSYASVSPVPYNSSKHSFVRLPEEYQAYNVEPDAPIPQFVVEDRFAIPPGQPGYVPEWQRLKCSTNKHRRMRQWSNQDYKPKAGRRAKPLEFQAHLTRERAKGALLVVMRIKEDWVVFDVRGLLRNVEWRKVLSEEAREKLTLKGLLDLFTGDPVIDTKRGIVTFLYKAEITKILSKRTVKTKNARDLLLRLTEPGEDGLRREVGLVAVDLGQTHPIAAAIYRIGRTSAGALESTVLHRQGLREDQKEKLKEYRKRHTALDSRLRKEAFETLSVEQQKEIVTVSGSGAQITKDKVCNYLGVDPSTLPWEKMGSYTHFISDDFLRRGGDPNIVHFDRQPKKGKVSKKSQRIKRSDSQWVGRMRPRLSQETAKARMEADWAAQNENEEYKRLARSKQELARWCVNTLLQNTRCITQCDEIVVVIEDLNVKSLHGKGAREPGWDNFFTPKTENRWFIQILHKTFSELPKHRGEHVIEGCPLRTSITCPACSYCDKNSRNGEKFVCVACGATFHADFEVATYNLVRLATTGMPMPKSLERQGGGEKAGGARKARKKAKQVEKIVVQANANVTMNGASLHSP

SEQ ID NO: 230 - protein, 812 aa, synthetic construct
  REGION 1..812: note = Casphi-10 polypeptide sequence
MDMLDTETNYATETPAQQQDYSPKPPKKAQRAPKGFSKKARPEKKPPKPITLFTQKHFSGVRFLKRVIRDASKILKLSESRTITFLEQAIERDGSAPPDVTPPVHNTIMAVTRPFEEWPEVILSKALQKHCYALTKKIKIKTWPKKGPGKKCLAAWSARTKIPLIPGQVQATNGLFDRIGSIYDGVEKKVTNRNANKKLEYDEAIKEGRNPAVPEYETAYNIDGTLINKPGYNPNLYITQSRTPRLITEADRPLVEKILWQMVEKKTQSRNQARRARLEKAAHLQGLPVPKFVPEKVDRSQKIEIRIIDPLDKIEPYMPQDRMAIKASQDGHVPYWQRPFLSKRRNRRVRAGWGKQVSSIQAWLTGALLVIVRLGNEAFLADIRGALRNAQWRKLLKPDATYQSLFNLFTGDPVVNTRTNHLTMAYREGVVNIVKSRSFKGRQTREHLLTLLGQGKTVAGVSFDLGQKHAAGLLAAHFGLGEDGNPVFTPIQACFLPQRYLDSLTNYRNRYDALTLDMRRQSLLALTPAQQQEFADAQRDPGGQAKRACCLKLNLNPDEIRWDLVSGISTMISDLYIERGGDPRDVHQQVETKPKGKRKSEIRILKIRDGKWAYDFRPKIADETRKAQREQLWKLQKASSEFERLSRYKINIARAIANWALQWGRELSGCDIVIPVLEDLNVGSKFFDGKGKWLLGWDNRFTPKKENRWFIKVLHKAVAELAPHRGVPVYEVMPHRTSMTCPACHYCHPTNREGDRFECQSCHVVKNTDRDVAPYNILRVAVEGKTLDRWQAEKKPQAEPDRPMILIDNQES

SEQ ID NO: 231 - protein, 84 aa, synthetic construct
  REGION 1..84: note = synthetic polypeptide sequence
MTNLSDIIEKETGKQLVIQESILMLPEEVEEVIGNKPESDILVHTAYDESTDENVMLLTSDAPEYKPWALVIQDSNGENKIKML

SEQ ID NO: 232 - protein, 1129 aa, Alicyclobacillus acidoterrestris
  REGION 1..1129: note = MISC_FEATURE - Cas12b/C2c1; sp|T0D7A2|C2C1_ALIAG CRISPR-associated endonuclease C2c1 OS = Alicyclobacillus acido-terrestris (strain ATCC 49025 /DSM 3922/ CIP 106132 / NCIMB 13137/GD3B) GN=c2c1 PE=1 SV=1; Cas12b/C2c1 polypeptide sequence
MAVKSIKVKLRLDDMPEIRAGLWKLHKEVNAGVRYYTEWLSLLRQENLYRRSPNGDGEQECDKTAEECKAELLERLRARQVENGHRGPAGSDDELLQLARQLYELLVPQAIGAKGDAQQIARKFLSPLADKDAVGGLGIAKAGNKPRWVRMREAGEPGWEEEKEKAETRKSADRTADVLRALADFGLKPLMRVYTDSEMSSVEWKPLRKGQAVRTWDRDMFQQAIERMMSWESWNQRVGQEYAKLVEQKNRFEQKNFVGQEHLVHLVNQLQQDMKEASPGLESKEQTAHYVTGRALRGSDKVFEKWGKLAPDAPFDLYDAEIKNVQRRNTRRFGSHDLFAKLAEPEYQALWREDASFLTRYAVYNSILRKLNHAKMFATFTLPDATAHPIWTRFDKLGGNLHQYTFLFNEFGERRHAIRFHKLLKVENGVAREVDDVTVPISMSEQLDNLLPRDPNEPIALYFRDYGAEQHFTGEFGGAKIQCRRDQLAHMHRRRGARDVYLNVSVRVQSQSEARGERRPPYAAVFRLVGDNHRAFVHFDKLSDYLAEHPDDGKLGSEGLLSGLRVMSVDLGLRTSASISVFRVARKDELKPNSKGRVPFFFPIKGNDNLVAVHERSQLLKLPGETESKDLRAIREERQRTLRQLRTQLAYLRLLVRCGSEDVGRRERSWAKLIEQPVDAANHMTPDWREAFENELQKLKSLHGICSDKEWMDAVYESVRRVWRHMGKQVRDWRKDVRSGERPKIRGYAKDVVGGNSIEQIEYLERQYKFLKSWSFFGKVSGQVIRAEKGSRFAITLREHIDHAKEDRLKKLADRIIMEALGYVYALDERGKGKWVAKYPPCQLILLEELSEYQFNNDRPPSENNQLMQWSHRGVFQELINQAQVHDLLVGTMYAAFSSRFDARTGAPGIRCRRVPARCTQEHNPEPFPWWLNKFVVEHTLDACPLRADDLIPTGEGEIFVSPFSAEEGDFHQIHADLNAAQNLQQRLWSDFDISQIRLRCDWGEVDGELVLIPRLTGKRTADSYSNKVFYTNTGVTYYERERGKKRRKVFAQEKLSEEEAELLVEADEAREKSVVLMRDPSGIINRGNWTRQKEFWSMVNQRIEGYLVKQIRSRVPLQDSACENTGDI

SEQ ID NO: 233 - protein, 1368 aa, Mus musculus
  REGION 1..1368: note = MISC_FEATURE - high fidelity Cas9 polypeptide sequence
MDKKYSIGLAIGTNSVGWAVITDEYKVPSKKFKVLGNTDRHSIKKNLIGALLFDSGETAEATRLKRTARRRYTRRKNRICYLQEIFSNEMAKVDDSFFHRLEESFLVEEDKKHERHPIFGNIVDEVAYHEKYPTIYHLRKKLVDSTDKADLRLIYLALAHMIKFRGHFLIEGDLNPDNSDVDKLFIQLVQTYNQLFEENPINASGVDAKAILSARLSKSRRLENLIAQLPGEKKNGLFGNLIALSLGLTPNFKSNFDLAEDAKLQLSKDTYDDDLDNLLAQIGDQYADLFLAAKNLSDAILLSDILRVNTEITKAPLSASMIKRYDEHHQDLTLLKALVRQQLPEKYKEIFFDQSKNGYAGYIDGGASQEEFYKFIKPILEKMDGTEELLVKLNREDLLRKQRTFDNGSIPHQIHLGELHAILRRQEDFYPFLKDNREKIEKILTFRIPYYVGPLARGNSRFAWMTRKSEETITPWNFEEVVDKGASAQSFIERMTAFDKNLPNEKVLPKHSLLYEYFTVYNELTKVKYVTEGMRKPAFLSGEQKKAIVDLLFKTNRKVTVKQLKEDYFKKIECFDSVEISGVEDRFNASLGTYHDLLKIIKDKDFLDNEENEDILEDIVLTLTLFEDREMIEERLKTYAHLFDDKVMKQLKRRRYTGWGALSRKLINGIRDKQSGKTILDFLKSDGFANRNFMALIHDDSLTFKEDIQKAQVSGQGDSLHEHIANLAGSPAIKKGILQTVKVVDELVKVMGRHKPENIVIEMARENQTTQKGQKNSRERMKRIEEGIKELGSQILKEHPVENTQLQNEKLYLYYLQNGRDMYVDQELDINRLSDYDVDHIVPQSFLKDDSIDNKVLTRSDKNRGKSDNVPSEEVVKKMKNYWRQLLNAKLITQRKFDNLTKAERGGLSELDKAGFIKRQLVETRAITKHVAQILDSRMNTKYDENDKLIREVKVITLKSKLVSDFRKDFQFYKVREINNYHHAHDAYLNAVVGTALIKKYPKLESEFVYGDYKVYDVRKMIAKSEQEIGKATAKYFFYSNIMNFFKTEITLANGEIRKRPLIETNGETGEIVWDKGRDFATVRKVLSMPQVNIVKKTEVQTGGFSKESILPKRNSDKLIARKKDWDPKKYGGFDSPTVAYSVLVVAKVEKGKSKKLKSVKELLGITIMERSSFEKNPIDFLEAKGYKEVKKDLIIKLPKYSLFELENGRKRMLASAGELQKGNELALPSKYVNFLYLASHYEKLKGSPEDNEQKQLFVEQHKHYLDEIIEQISEFSKRVILADANLDKVLSAYNKHRDKPIREQAENIIHLFTLTNLGAPAAFKYFDTTIDRKRYTSTKEVLDATLIHQSITGLYETRIDLSQLGGD

SEQ ID NO: 234 - protein, 1368 aa, Streptococcus pyogenes
  REGION 1..1368: note = MISC_FEATURE - PAM-binding SpEQR Cas9 polypeptide sequence
MDKKYSIGLAIGTNSVGWAVITDEYKVPSKKFKVLGNTDRHSIKKNLIGALLFDSGETAEATRLKRTARRRYTRRKNRICYLQEIFSNEMAKVDDSFFHRLEESVLVEEDKKHERHPIFGNIVDEVAYHEKYPTIYHLRKKLVDSTDKADLRLIYLALAHMIKFRGHFLIEGDLNPDNSDVDKLFIQLVQTYNQLFEENPINASGVDAKAILSARLSKSRRLENLIAQLPGEKKNGLFGNLIALSLGLTPNFKSNFDLAEDAKLQLSKDTYDDDLDNLLAQIGDQYADLFLAAKNLSDAILLSDILRVNTEITKAPLSASMIKRYDEHHQDLTLLKALVRQQLPEKYKEIFFDQSKNGYAGYIDGGASQEEFYKFIKPILEKMDGTEELLVKLNREDLLRKQRTFDNGSIPHQIHLGELHAILRRQEDFYPFLKDNREKIEKILTFRIPYYVGPLARGNSRFAWMTRKSEETITPWNFEEVVDKGASAQSFIERMTNFDKNLPNEKVLPKHSLLYEYFTVYNELTKVKYVTEGMRKPAFLSGEQKKAIVDLLFKTNRKVTVKQLKEDYFKKIECFDSVEISGVEDRFNASLGTYHDLLKIIKDKDFLDNEENEDILEDIVLTLTLFEDREMIEERLKTYAHLFDDKVMKQLKRRRYTGWGRLSRKLINGIRDKQSGKTILDFLKSDGFANRNFMQLIHDDSLTFKEDIQKAQVSGQGDSLHEHIANLAGSPAIKKGILQTVKVVDELVKVMGRHKPENIVIEMARENQTTQKGQKNSRERMKRIEEGIKELGSQILKEHPVENTQLQNEKLYLYYLQNGRDMYVDQELDINRLSDYDVDHIVPQSFLKDDSIDNKVLTRSDKNRGKSDNVPSEEVVKKMKNYWRQLLNAKLITQRKFDNLTKAERGGLSELDKAGFIKRQLVETRQITKHVAQILDSRMNTKYDENDKLIREVKVITLKSKLVSDFRKDFQFYKVREINNYHHAHDAYLNAVVGTALIKKYPKLESEFVYGDYKVYDVRKMIAKSEQEIGKATAKYFFYSNIMNFFKTEITLANGEIRKRPLIETNGETGEIVWDKGRDFATVRKVLSMPQVNIVKKTEVQTGGFSKESILPKRNSDKLIARKKDWDPKKYGGFESPTVAYSVLVVAKVEKGKSKKLKSVKELLGITIMERSSFEKNPIDFLEAKGYKEVKKDLIIKLPKYSLFELENGRKRMLASAGELQKGNELALPSKYVNFLYLASHYEKLKGSPEDNEQKQLFVEQHKHYLDEIIEQISEFSKRVILADANLDKVLSAYNKHRDKPIREQAENIIHLFTLTNLGAPAAFKYFDTTIDRKQYRSTKEVLDATLIHQSITGLYETRIDLSQLGGD

SEQ ID NO: 235 - protein, 1368 aa, Streptococcus pyogenes
  REGION 1..1368: note = MISC_FEATURE - PAM-binding SpVQR Cas9 polypeptide sequence
MDKKYSIGLAIGTNSVGWAVITDEYKVPSKKFKVLGNTDRHSIKKNLIGALLFDSGETAEATRLKRTARRRYTRRKNRICYLQEIFSNEMAKVDDSFFHRLEESFLVEEDKKHERHPIFGNIVDEVAYHEKYPTIYHLRKKLVDSTDKADLRLIYLALAHMIKFRGHFLIEGDLNPDNSDVDKLFIQLVQTYNQLFEENPINASGVDAKAILSARLSKSRRLENLIAQLPGEKKNGLFGNLIALSLGLTPNFKSNFDLAEDAKLQLSKDTYDDDLDNLLAQIGDQYADLFLAAKNLSDAILLSDILRVNTEITKAPLSASMIKRYDEHHQDLTLLKALVRQQLPEKYKEIFFDQSKNGYAGYIDGGASQEEFYKFIKPILEKMDGTEELLVKLNREDLLRKQRTFDNGSIPHQIHLGELHAILRRQEDFYPFLKDNREKIEKILTFRIPYYVGPLARGNSRFAWMTRKSEETITPWNFEEVVDKGASAQSFIERMTNFDKNLPNEKVLPKHSLLYEYFTVYNELTKVKYVTEGMRKPAFLSGEQKKAIVDLLFKTNRKVTVKQLKEDYFKKIECFDSVEISGVEDRFNASLGTYHDLLKIIKDKDFLDNEENEDILEDIVLTLTLFEDREMIEERLKTYAHLFDDKVMKQLKRRRYTGWGRLSRKLINGIRDKQSGKTILDFLKSDGFANRNFMQLIHDDSLTFKEDIQKAQVSGQGDSLHEHIANLAGSPAIKKGILQTVKVVDELVKVMGRHKPENIVIEMARENQTTQKGQKNSRERMKRIEEGIKELGSQILKEHPVENTQLQNEKLYLYYLQNGRDMYVDQELDINRLSDYDVDHIVPQSFLKDDSIDNKVLTRSDKNRGKSDNVPSEEVVKKMKNYWRQLLNAKLITQRKFDNLTKAERGGLSELDKAGFIKRQLVETRQITKHVAQILDSRMNTKYDENDKLIREVKVITLKSKLVSDFRKDFQFYKVREINNYHHAHDAYLNAVVGTALIKKYPKLESEFVYGDYKVYDVRKMIAKSEQEIGKATAKYFFYSNIMNFFKTEITLANGEIRKRPLIETNGETGEIVWDKGRDFATVRKVLSMPQVNIVKKTEVQTGGFSKESILPKRNSDKLIARKKDWDPKKYGGFVSPTVAYSVLVVAKVEKGKSKKLKSVKELLGITIMERSSFEKNPIDFLEAKGYKEVKKDLIIKLPKYSLFELENGRKRMLASAGELQKGNELALPSKYVNFLYLASHYEKLKGSPEDNEQKQLFVEQHKHYLDEIIEQISEFSKRVILADANLDKVLSAYNKHRDKPIREQAENIIHLFTLTNLGAPAAFKYFDTTIDRKQYRSTKEVLDATLIHQSITGLYETRIDLSQLGGD

SEQ ID NO: 236 - protein, 1368 aa, Streptococcus pyogenes
  REGION 1..1368: note = MISC_FEATURE - SpVQR Cas9 polypeptide sequence
MDKKYSIGLAIGTNSVGWAVITDEYKVPSKKFKVLGNTDRHSIKKNLIGALLFDSGETAEATRLKRTARRRYTRRKNRICYLQEIFSNEMAKVDDSFFHRLEESFLVEEDKKHERHPIFGNIVDEVAYHEKYPTIYHLRKKLVDSTDKADLRLIYLALAHMIKFRGHFLIEGDLNPDNSDVDKLFIQLVQTYNQLFEENPINASGVDAKAILSARLSKSRRLENLIAQLPGEKKNGLFGNLIALSLGLTPNFKSNFDLAEDAKLQLSKDTYDDDLDNLLAQIGDQYADLFLAAKNLSDAILLSDILRVNTEITKAPLSASMIKRYDEHHQDLTLLKALVRQQLPEKYKEIFFDQSKNGYAGYIDGGASQEEFYKFIKPILEKMDGTEELLVKLNREDLLRKQRTFDNGSIPHQIHLGELHAILRRQEDFYPFLKDNREKIEKILTFRIPYYVGPLARGNSRFAWMTRKSEETITPWNFEEVVDKGASAQSFIERMTNFDKNLPNEKVLPKHSLLYEYFTVYNELTKVKYVTEGMRKPAFLSGEQKKAIVDLLFKTNRKVTVKQLKEDYFKKIECFDSVEISGVEDRFNASLGTYHDLLKIIKDKDFLDNEENEDILEDIVLTLTLFEDREMIEERLKTYAHLFDDKVMKQLKRRRYTGWGRLSRKLINGIRDKQSGKTILDFLKSDGFANRNFMQLIHDDSLTFKEDIQKAQVSGQGDSLHEHIANLAGSPAIKKGILQTVKVVDELVKVMGRHKPENIVIEMARENQTTQKGQKNSRERMKRIEEGIKELGSQILKEHPVENTQLQNEKLYLYYLQNGRDMYVDQELDINRLSDYDVDHIVPQSFLKDDSIDNKVLTRSDKNRGKSDNVPSEEVVKKMKNYWRQLLNAKLITQRKFDNLTKAERGGLSELDKAGFIKRQLVETRQITKHVAQILDSRMNTKYDENDKLIREVKVITLKSKLVSDFRKDFQFYKVREINNYHHAHDAYLNAVVGTALIKKYPKLESEFVYGDYKVYDVRKMIAKSEQEIGKATAKYFFYSNIMNFFKTEITLANGEIRKRPLIETNGETGEIVWDKGRDFATVRKVLSMPQVNIVKKTEVQTGGFSKESILPKRNSDKLIARKKDWDPKKYGGFVSPTVAYSVLVVAKVEKGKSKKLKSVKELLGITIMERSSFEKNPIDFLEAKGYKEVKKDLIIKLPKYSLFELENGRKRMLASARELQKGNELALPSKYVNFLYLASHYEKLKGSPEDNEQKQLFVEQHKHYLDEIIEQISEFSKRVILADANLDKVLSAYNKHRDKPIREQAENIIHLFTLTNLGAPAAFKYFDTTIDRKEYRSTKEVLDATLIHQSITGLYETRIDLSQLGGD

SEQ ID NO: 237 - protein, 1359 aa, Streptococcus macacae
  REGION 1..1359: note = MISC_FEATURE - SpyMacCas9 polypeptide sequence
MDKKYSIGLDIGTNSVGWAVITDDYKVPSKKFKVLGNTDRHSIKKNLIGALLFGSGETAEATRLKRTARRRYTRRKNRICYLQEIFSNEMAKVDDSFFHRLEESFLVEEDKKHERHPIFGNIVDEVAYHEKYPTIYHLRKKLADSTDKADLRLIYLALAHMIKFRGHFLIEGDLNPDNSDVDKLFIQLVQIYNQLFEENPINASRVDAKAILSARLSKSRRLENLIAQLPGEKRNGLFGNLIALSLGLTPNFKSNFDLAEDAKLQLSKDTYDDDLDNLLAQIGDQYADLFLAAKNLSDAILLSDILRVNSEITKAPLSASMIKRYDEHHQDLTLLKALVRQQLPEKYKEIFFDQSKNGYAGYIDGGASQEEFYKFIKPILEKMDGTEELLVKLNREDLLRKQRTFDNGSIPHQIHLGELHAILRRQEDFYPFLKDNREKIEKILTFRIPYYVGPLARGNSRFAWMTRKSEETITPWNFEEVVDKGASAQSFIERMTNFDKNLPNEKVLPKHSLLYEYFTVYNELTKVKYVTEGMRKPAFLSGEQKKAIVDLLFKTNRKVTVKQLKEDYFKKIECFDSVEISGVEDRFNASLGAYHDLLKIIKDKDFLDNEENEDILEDIVLTLTLFEDRGMIEERLKTYAHLFDDKVMKQLKRRRYTGWGRLSRKLINGIRDKQSGKTILDFLKSDGFANRNFMQLIHDDSLTFKEDIQKAQVSGQGHSLHEQIANLAGSPAIKKGILQTVKIVDELVKVMGHKPENIVIEMARENQTTQKGQKNSRERMKRIEEGIKELGSQILKEHPVENTQLQNEKLYLYYLQNGRDMYVDQELDINRLSDYDVDHIVPQSFIKDDSIDNKVLTRSDKNRGKSDNVPSEEVVKKMKNYWRQLLNAKLITQRKFDNLTKAERGGLSELDKAGFIKRQLVETRQITKHVAQILDSRMNTKYDENDKLIREVKVITLKSKLVSDFRKDFQFYKVREINNYHHAHDAYLNAVVGTALIKKYPKLESEFVYGDYKVYDVRKMIAKSEQEIGKATAKYFFYSNIMNFFKTEITLANGEIRKRPLIETNGETGEIVWDKGRDFATVRKVLSMPQVNIVKKTEIQTVGQNGGLFDDNPKSPLEVTPSKLVPLKKELNPKKYGGYQKPTTAYPVLLITDTKQLIPISVMNKKQFEQNPVKFLRDRGYQQVGKNDFIKLPKYTLVDIGDGIKRLWASSKEIHKGNQLVVSKKSQILLYHAHHLDSDLSNDYLQNHNQQFDVLFNEIISFSKKCKLGKEHIQKIENVYSNKKNSASIEELAESFIKLLGFTQLGATSPFNFLGVKLNQKQYKGKKDYILPCTEGTLIRQSITGLYETRVDLSKIGED

SEQ ID NO: 238 - protein, 1410 aa, synthetic construct
  REGION 1..1410: note = CP5 polypeptide sequence
  REGION 1..341: note = MISC_FEATURE - Sequence derived from Cas9
  REGION 342..362: note = MISC_FEATURE - Linker sequence
  REGION 363..1388: note = MISC_FEATURE - Sequence derived from Cas9
  REGION 1389..1410: note = MISC_FEATURE - Bipartite nuclear localization sequence
EIGKATAKYFFYSNIMNFFKTEITLANGEIRKRPLIETNGETGEIVWDKGRDFATVRKVLSMPQVNIVKKTEVQTGGFSKESILPKRNSDKLIARKKDWDPKKYGGFMQPTVAYSVLVVAKVEKGKSKKLKSVKELLGITIMERSSFEKNPIDFLEAKGYKEVKKDLIIKLPKYSLFELENGRKRMLASAKFLQKGNELALPSKYVNFLYLASHYEKLKGSPEDNEQKQLFVEQHKHYLDEIIEQISEFSKRVILADANLDKVLSAYNKHRDKPIREQAENIIHLFTLTNLGAPRAFKYFDTTIARKEYRSTKEVLDATLIHQSITGLYETRIDLSQLGGDGGSGGSGGSGGSGGSGGSGGMDKKYSIGLAIGTNSVGWAVITDEYKVPSKKFKVLGNTDRHSIKKNLIGALLFDSGETAEATRLKRTARRRYTRRKNRICYLQEIFSNEMAKVDDSFFHRLEESFLVEEDKKHERHPIFGNIVDEVAYHEKYPTIYHLRKKLVDSTDKADLRLIYLALAHMIKFRGHFLIEGDLNPDNSDVDKLFIQLVQTYNQLFEENPINASGVDAKAILSARLSKSRRLENLIAQLPGEKKNGLFGNLIALSLGLTPNFKSNFDLAEDAKLQLSKDTYDDDLDNLLAQIGDQYADLFLAAKNLSDAILLSDILRVNTEITKAPLSASMIKRYDEHHQDLTLLKALVRQQLPEKYKEIFFDQSKNGYAGYIDGGASQEEFYKFIKPILEKMDGTEELLVKLNREDLLRKQRTFDNGSIPHQIHLGELHAILRRQEDFYPFLKDNREKIEKILTFRIPYYVGPLARGNSRFAWMTRKSEETITPWNFEEVVDKGASAQSFIERMTNFDKNLPNEKVLPKHSLLYEYFTVYNELTKVKYVTEGMRKPAFLSGEQKKAIVDLLFKTNRKVTVKQLKEDYFKKIECFDSVEISGVEDRFNASLGTYHDLLKIIKDKDFLDNEENEDILEDIVLTLTLFEDREMIEERLKTYAHLFDDKVMKQLKRRRYTGWGRLSRKLINGIRDKQSGKTILDFLKSDGFANRNFMQLIHDDSLTFKEDIQKAQVSGQGDSLHEHIANLAGSPAIKKGILQTVKVVDELVKVMGRHKPENIVIEMARENQTTQKGQKNSRERMKRIEEGIKELGSQILKEHPVENTQLQNEKLYLYYLQNGRDMYVDQELDINRLSDYDVDHIVPQSFLKDDSIDNKVLTRSDKNRGKSDNVPSEEVVKKMKNYWRQLLNAKLITQRKFDNLTKAERGGLSELDKAGFIKRQLVETRQITKHVAQILDSRMNTKYDENDKLIREVKVITLKSKLVSDFRKDFQFYKVREINNYHHAHDAYLNAVVGTALIKKYPKLESEFVYGDYKVYDVRKMIAKSEQEGADKRTADGSEFESPKKKRKV

SEQ ID NO: 239 - protein, 1302 aa, synthetic construct
  REGION 1..1302: note = Cas12c1 polypeptide sequence
MQTKKTHLHLISAKASRKYRRTIACLSDTAKKDLERRKQSGAADPAQELSCLKTIKFKLEVPEGSKLPSFDRISQIYNALETIEKGSLSYLLFALILSGFRIFPNSSAAKTFASSSCYKNDQFASQIKEIFGEMVKNFIPSELESILKKGRRKNNKDWTEENIKRVLNSEFGRKNSEGSSALFDSFLSKFSQELFRKFDSWNEVNKKYLEAAELLDSMLASYGPFDSVCKMIGDSDSRNSLPDKSTIAFTNNAEITVDIESSVMPYMAIAALLREYRQSKSKAAPVAYVQSHLTTTNGNGLSWFFKFGLDLIRKAPVSSKQSTSDGSKSLQELFSVPDDKLDGLKFIKEACEALPEASLLCGEKGELLGYQDFRTSFAGHIDSWVANYVNRLFELIELVNQLPESIKLPSILTQKNHNLVASLGLQEAEVSHSLELFEGLVKNVRQTLKKLAGIDISSSPNEQDIKEFYAFSDVLNRLGSIRNQIENAVQTAKKDKIDLESAIEWKEWKKLKKLPKLNGLGGGVPKQQELLDKALESVKQIRHYQRIDFERVIQWAVNEHCLETVPKFLVDAEKKKINKESSTDFAAKENAVRFLLEGIGAAARGKTDSVSKAAYNWFVVNNFLAKKDLNRYFINCQGCIYKPPYSKRRSLAFALRSDNKDTIEVVWEKFETFYKEISKEIEKFNIFSQEFQTFLHLENLRMKLLLRRIQKPIPAEIAFFSLPQEYYDSLPPNVAFLALNQEITPSEYITQFNLYSSFLNGNLILLRRSRSYLRAKFSWVGNSKLIYAAKEARLWKIPNAYWKSDEWKMILDSNVLVFDKAGNVLPAPTLKKVCEREGDLRLFYPLLRQLPHDWCYRNPFVKSVGREKNVIEVNKEGEPKVASALPGSLFRLIGPAPFKSLLDDCFFNPLDKDLRECMLIVDQEISQKVEAQKVEASLESCTYSIAVPIRYHLEEPKVSNQFENVLAIDQGEAGLAYAVFSLKSIGEAETKPIAVGTIRIPSIRRLIHSVSTYRKKKQRLQNFKQNYDSTAFIMRENVTGDVCAKIVGLMKEFNAFPVLEYDVKNLESGSRQLSAVYKAVNSHFLYFKEPGRDALRKQLWYGGDSWTIDGIEIVTRERKEDGKEGVEKIVPLKVFPGRSVSARFTSKTCSCCGRNVFDWLFTEKKAKTNKKFNVNSKGELTTADGVIQLFEADRSKGPKFYARRKERTPLTKPIAKGSYSLEEIERRVRTNLRRAPKSKQSRDTSQSQYFCVYKDCALHFSGMQADENAAINIGRRFLTALRKNRRSDFPSNVKISDRLLDN

SEQ ID NO: 240 - protein, 1218 aa, synthetic construct
  REGION 1..1218: note = Cas12c2 polypeptide sequence
MTKHSIPLHAFRNSGADARKWKGRIALLAKRGKETMRTLQFPLEMSEPEAAAINTTPFAVAYNAIEGTGKGTLFDYWAKLHLAGFRFFPSGGAATIFRQQAVFEDASWNAAFCQQSGKDWPWLVPSKLYERFTKAPREVAKKDGSKKSIEFTQENVANESHVSLVGASITDKTPEDQKEFFLKMAGALAEKFDSWKSANEDRIVAMKVIDEFLKSEGLHLPSLENIAVKCSVETKPDNATVAWHDAPMSGVQNLAIGVFATCASRIDNIYDLNGGKLSKLIQESATTPNVTALSWLFGKGLEYFRTTDIDTIMQDFNIPASAKESIKPLVESAQAIPTMTVLGKKNYAPFRPNFGGKIDSWIANYASRLMLLNDILEQIEPGFELPQALLDNETLMSGIDMTGDELKELIEAVYAWVDAAKQGLATLLGRGGNVDDAVQTFEQFSAMMDTLNGTLNTISARYVRAVEMAGKDEARLEKLIECKFDIPKWCKSVPKLVGISGGLPKVEEEIKVMNAAFKDVRARMFVRFEEIAAYVASKGAGMDVYDALEKRELEQIKKLKSAVPERAHIQAYRAVLHRIGRAVQNCSEKTKQLFSSKVIEMGVFKNPSHLNNFIFNQKGAIYRSPFDRSRHAPYQLHADKLLKNDWLELLAEISATLMASESTEQMEDALRLERTRLQLQLSGLPDWEYPASLAKPDIEVEIQTALKMQLAKDTVTSDVLQRAFNLYSSVLSGLTFKLLRRSFSLKMRFSVADTTQLIYVPKVCDWAIPKQYLQAEGEIGIAARVVTESSPAKMVTEVEMKEPKALGHFMQQAPHDWYFDASLGGTQVAGRIVEKGKEVGKERKLVGYRMRGNSAYKTVLDKSLVGNTELSQCSMIIEIPYTQTVDADFRAQVQAGLPKVSINLPVKETITASNKDEQMLFDRFVAIDLGERGLGYAVFDAKTLELQESGHRPIKAITNLLNRTHHYEQRPNQRQKFQAKFNVNLSELRENTVGDVCHQINRICAYYNAFPVLEYMVPDRLDKQLKSVYESVTNRYIWSSTDAHKSARVQFWLGGETWEHPYLKSAKDKKPLVLSPGRGASGKGTSQTCSCCGRNPFDLIKDMKPRAKIAVVDGKAKLENSELKLFERNLESKDDMLARRHRNERAGMEQPLTPGNYTVDEIKALLRANLRRAPKNRRTKDTTVSEYHCVFSDCGKTMHADENAAVNIGGKFIADIEK

SEQ ID NO: 241 - protein, 1252 aa, Oleiphilus sp.
  REGION 1..1252: note = MISC_FEATURE - OspCas12c polypeptide sequence
MTKLRHRQKKLTHDWAGSKKREVLGSNGKLQNPLLMPVKKGQVTEFRKAFSAYARATKGEMTDGRKNMFTHSFEPFKTKPSLHQCELADKAYQSLHSYLPGSLAHFLLSAHALGFRIFSKSGEATAFQASSKIEAYESKLASELACVDLSIQNLTISTLFNALTTSVRGKGEETSADPLIARFYTLLTGKPLSRDTQGPERDLAEVISRKIASSFGTWKEMTANPLQSLQFFEEELHALDANVSLSPAFDVLIKMNDLQGDLKNRTIVFDPDAPVFEYNAEDPADIIIKLTARYAKEAVIKNQNVGNYVKNAITTTNANGLGWLLNKGLSLLPVSTDDELLEFIGVERSHPSCHALIELIAQLEAPELFEKNVFSDTRSEVQGMIDSAVSNHIARLSSSRNSLSMDSEELERLIKSFQIHTPHCSLFIGAQSLSQQLESLPEALQSGVNSADILLGSTQYMLTNSLVEESIATYQRTLNRINYLSGVAGQINGAIKRKAIDGEKIHLPAAWSELISLPFIGQPVIDVESDLAHLKNQYQTLSNEFDTLISALQKNFDLNFNKALLNRTQHFEAMCRSTKKNALSKPEIVSYRDLLARLTSCLYRGSLVLRRAGIEVLKKHKIFESNSELREHVHERKHFVFVSPLDRKAKKLLRLTDSRPDLLHVIDEILQHDNLENKDRESLWLVRSGYLLAGLPDQLSSSFINLPIITQKGDRRLIDLIQYDQINRDAFVMLVTSAFKSNLSGLQYRANKQSFVVTRTLSPYLGSKLVYVPKDKDWLVPSQMFEGRFADILQSDYMVWKDAGRLCVIDTAKHLSNIKKSVFSSEEVLAFLRELPHRTFIQTEVRGLGVNVDGIAFNNGDIPSLKTFSNCVQVKVSRTNTSLVQTLNRWFEGGKVSPPSIQFERAYYKKDDQIHEDAAKRKIRFQMPATELVHASDDAGWTPSYLLGIDPGEYGMGLSLVSINNGEVLDSGFIHINSLINFASKKSNHQTKVVPRQQYKSPYANYLEQSKDSAAGDIAHILDRLIYKLNALPVFEALSGNSQSAADQVWTKVLSFYTWGDNDAQNSIRKQHWFGASHWDIKGMLRQPPTEKKPKPYIAFPGSQVSSYGNSQRCSCCGRNPIEQLREMAKDTSIKELKIRNSEIQLFDGTIKLFNPDPSTVIERRRHNLGPSRIPVADRTFKNISPSSLEFKELITIVSRSIRHSPEFIAKKRGIGSEYFCAYSDCNSSLNSEANAAANVAQKFQKQLFFEL

SEQ ID NO: 242 - protein, 767 aa, synthetic construct
  REGION 1..767: note = Cas12g1 polypeptide sequence
MAQASSTPAVSPRPRPRYREERTLVRKLLPRPGQSKQEFRENVKKLRKAFLQFNADVSGVCQWAIQFRPRYGKPAEPTETFWKFFLEPETSLPPNDSRSPEFRRLQAFEAAAGINGAAALDDPAFTNELRDSILAVASRPKTKEAQRLFSRLKDYQPAHRMILAKVAAEWIESRYRRAHQNWERNYEEWKKEKQEWEQNHPELTPEIREAFNQIFQQLEVKEKRVRICPAARLLQNKDNCQYAGKNKHSVLCNQFNEFKKNHLQGKAIKFFYKDAEKYLRCGLQSLKPNVQGPFREDWNKYLRYMNLKEETLRGKNGGRLPHCKNLGQECEFNPHTALCKQYQQQLSSRPDLVQHDELYRKWRREYWREPRKPVFRYPSVKRHSIAKIFGENYFQADFKNSVVGLRLDSMPAGQYLEFAFAPWPRNYRPQPGETEISSVHLHFVGTRPRIGFRFRVPHKRSRFDCTQEELDELRSRTFPRKAQDQKFLEAARKRLLETFPGNAEQELRLLAVDLGTDSARAAFFIGKTFQQAFPLKIVKIEKLYEQWPNQKQAGDRRDASSKQPRPGLSRDHVGRHLQKMRAQASEIAQKRQELTGTPAPETTTDQAAKKATLQPFDLRGLTVHTARMIRDWARLNARQIIQLAEENQVDLIVLESLRGFRPPGYENLDQEKKRRVAFFAHGRIRRKVTEKAVERGMRVVTVPYLASSKVCAECRKKQKDNKQWEKNKKRGLFKCEGCGSQAQVDENAARVLGRVFWGEIELPTAIP

SEQ ID NO: 243 - protein, 870 aa, synthetic construct
  REGION 1..870: note = Cas12h1 polypeptide sequence
MKVHEIPRSQLLKIKQYEGSFVEWYRDLQEDRKKFASLLFRWAAFGYAAREDDGATYISPSQALLERRLLLGDAEDVAIKFLDVLFKGGAPSSSCYSLFYEDFALRDKAKYSGAKREFIEGLATMPLDKIIERIRQDEQLSKIPAEEWLILGAEYSPEEIWEQVAPRIVNVDRSLGKQLRERLGIKCRRPHDAGYCKILMEVVARQLRSHNETYHEYLNQTHEMKTKVANNLTNEFDLVCEFAEVLEEKNYGLGWYVLWQGVKQALKEQKKPTKIQIAVDQLRQPKFAGLLTAKWRALKGAYDTWKLKKRLEKRKAFPYMPNWDNDYQIPVGLTGLGVFTLEVKRTEVVVDLKEHGKLFCSHSHYFGDLTAEKHPSRYHLKFRHKLKLRKRDSRVEPTIGPWIEAALREITIQKKPNGVFYLGLPYALSHGIDNFQIAKRFFSAAKPDKEVINGLPSEMVVGAADLNLSNIVAPVKARIGKGLEGPLHALDYGYGELIDGPKILTPDGPRCGELISLKRDIVEIKSAIKEFKACQREGLTMSEETTTWLSEVESPSDSPRCMIQSRIADTSRRLNSFKYQMNKEGYQDLAEALRLLDAMDSYNSLLESYQRMHLSPGEQSPKEAKFDTKRASFRDLLRRRVAHTIVEYFDDCDIVFFEDLDGPSDSDSRNNALVKLLSPRTLLLYIRQALEKRGIGMVEVAKDGTSQNNPISGHVGWRNKQNKSEIYFYEDKELLVMDADEVGAMNILCRGLNHSVCPYSFVTKAPEKKNDEKKEGDYGKRVKRFLKDRYGSSNVRFLVASMGFVTVTTKRPKDALVGKRLYYHGGELVTHDLHNRMKDEIKYLVEKEVLARRVSLSDSTIKSYKSFAHV

SEQ ID NO: 244 - protein, 1093 aa, synthetic construct
  REGION 1..1093: note = Cas12i1 polypeptide sequence
MSNKEKNASETRKAYTTKMIPRSHDRMKLLGNFMDYLMDGTPIFFELWNQFGGGIDRDIISGTANKDKISDDLLLAVNWFKVMPINSKPQGVSPSNLANLFQQYSGSEPDIQAQEYFASNFDTEKHQWKDMRVEYERLLAELQLSRSDMHHDLKLMYKEKCIGLSLSTAHYITSVMFGTGAKNNRQTKHQFYSKVIQLLEESTQINSVEQLASIILKAGDCDSYRKLRIRCSRKGATPSILKIVQDYELGTNHDDEVNVPSLIANLKEKLGRFEYECEWKCMEKIKAFLASKVGPYYLGSYSAMLENALSPIKGMTTKNCKFVLKQIDAKNDIKYENEPFGKIVEGFFDSPYFESDTNVKWVLHPHHIGESNIKTLWEDLNAIHSKYEEDIASLSEDKKEKRIKVYQGDVCQTINTYCEEVGKEAKTPLVQLLRYLYSRKDDIAVDKIIDGITFLSKKHKVEKQKINPVIQKYPSFNFGNNSKLLGKIISPKDKLKHNLKCNRNQVDNYIWIEIKVLNTKTMRWEKHHYALSSTRFLEEVYYPATSENPPDALAARFRTKTNGYEGKPALSAEQIEQIRSAPVGLRKVKKRQMRLEAARQQNLLPRYTWGKDFNINICKRGNNFEVTLATKVKKKKEKNYKVVLGYDANIVRKNTYAAIEAHANGDGVIDYNDLPVKPIESGFVTVESQVRDKSYDQLSYNGVKLLYCKPHVESRRSFLEKYRNGTMKDNRGNNIQIDFMKDFEAIADDETSLYYFNMKYCKLLQSSIRNHSSQAKEYREEIFELLRDGKLSVLKLSSLSNLSFVMFKVAKSLIGTYFGHLLKKPKNSKSDVKAPPITDEDKQKADPEMFALRLALEEKRLNKVKSKKEVIANKIVAKALELRDKYGPVLIKGENISDTTKKGKKSSTNSFLMDWLARGVANKVKEMVMMHQGLEFVEVNPNFTSHQDPFVHKNPENTFRARYSRCTPSELTEKNRKEILSFLSDKPSKRPTNAYYNEGAMAFLATYGLKKNDVLGVSLEKFKQIMANILHQRSEDQLLFPSRGGMFYLATYKLDADATSVNWNGKQFWVCNADLVAAYNVGLVDIQKDFKKK

SEQ ID NO: 245 - protein, 1054 aa, synthetic construct
  REGION 1..1054: note = Cas12i2 polypeptide sequence
MSSAIKSYKSVLRPNERKNQLLKSTIQCLEDGSAFFFKMLQGLFGGITPEIVRFSTEQEKQQQDIALWCAVNWFRPVSQDSLTHTIASDNLVEKFEEYYGGTASDAIKQYFSASIGESYYWNDCRQQYYDLCRELGVEVSDLTHDLEILCREKCLAVATESNQNNSIISVLFGTGEKEDRSVKLRITKKILEAISNLKEIPKNVAPIQEIILNVAKATKETFRQVYAGNLGAPSTLEKFIAKDGQKEFDLKKLQTDLKKVIRGKSKERDWCCQEELRSYVEQNTIQYDLWAWGEMFNKAHTALKIKSTRNYNFAKQRLEQFKEIQSLNNLLVVKKLNDFFDSEFFSGEETYTICVHHLGGKDLSKLYKAWEDDPADPENAIVVLCDDLKNNFKKEPIRNILRYIFTIRQECSAQDILAAAKYNQQLDRYKSQKANPSVLGNQGFTWTNAVILPEKAQRNDRPNSLDLRIWLYLKLRHPDGRWKKHHIPFYDTRFFQEIYAAGNSPVDTCQFRTPRFGYHLPKLTDQTAIRVNKKHVKAAKTEARIRLAIQQGTLPVSNLKITEISATINSKGQVRIPVKFDVGRQKGTLQIGDRFCGYDQNQTASHAYSLWEVVKEGQYHKELGCFVRFISSGDIVSITENRGNQFDQLSYEGLAYPQYADWRKKASKFVSLWQITKKNKKKEIVTVEAKEKFDAICKYQPRLYKFNKEYAYLLRDIVRGKSLVELQQIRQEIFRFIEQDCGVTRLGSLSLSTLETVKAVKGIIYSYFSTALNASKNNPISDEQRKEFDPELFALLEKLELIRTRKKKQKVERIANSLIQTCLENNIKFIRGEGDLSTTNNATKKKANSRSMDWLARGVFNKIRQLAPMHNITLFGCGSLYTSHQDPLVHRNPDKAMKCRWAAIPVKDIGDWVLRKLSQNLRAKNIGTGEYYHQGVKEFLSHYELQDLEEELLKWRSDRKSNIPCWVLQNRLAEKLGNKEAVVYIPVRGGRIYFATHKVATGAVSIVFDQKQVWVCNADHVAAANIALTVKGIGEQSSDEENPDGSRIKLQLTS

SEQ ID NO: 246 - protein, 4 aa, synthetic construct
  REGION 1..4: note = synthetic peptide sequence
GGGS

SEQ ID NO: 247 - protein, 5 aa, synthetic construct
  REGION 1..5: note = synthetic peptide sequence
GGGGS

SEQ ID NO: 248 - protein, 5 aa, synthetic construct
  REGION 1..5: note = synthetic peptide sequence
EAAAK

SEQ ID NO: 249 - protein, 16 aa, synthetic construct
  REGION 1..16: note = synthetic peptide sequence
SGSETPGTSESATPES

SEQ ID NO: 250 - protein, 6 aa, synthetic construct
  REGION 1..6: note = linker peptide sequence
GGSGGS

SEQ ID NO: 251 - protein, 20 aa, synthetic construct
  REGION 1..20: note = synthetic peptide sequence
GSSGSETPGTSESATPESSG

SEQ ID NO: 252 - DNA, 18 bp, synthetic construct
  misc_feature 1..18: note = synthetic oligonucleotide sequence
  source 1..18: mol_type = other DNA
ggaggctctggaggaagc

SEQ ID NO: 253 - DNA, 60 bp, synthetic construct
  misc_feature 1..60: note = synthetic oligonucleotide sequence
  source 1..60: mol_type = other DNA
ggctcttctggatctgaaacacctggcacaagcgagagcgccacccctgagagctctggc

SEQ ID NO: 254 - protein, 1129 aa, Alicyclobacillus acidiphilus
  REGION 1..1129: note = MISC_FEATURE - AacCas12b polypeptide sequence
MAVKSMKVKLRLDNMPEIRAGLWKLHTEVNAGVRYYTEWLSLLRQENLYRRSPNGDGEQECYKTAEECKAELLERLRARQVENGHCGPAGSDDELLQLARQLYELLVPQAIGAKGDAQQIARKFLSPLADKDAVGGLGIAKAGNKPRWVRMREAGEPGWEEEKAKAEARKSTDRTADVLRALADFGLKPLMRVYTDSDMSSVQWKPLRKGQAVRTWDRDMFQQAIERMMSWESWNQRVGEAYAKLVEQKSRFEQKNFVGQEHLVQLVNQLQQDMKEASHGLESKEQTAHYLTGRALRGSDKVFEKWEKLDPDAPFDLYDTEIKNVQRRNTRRFGSHDLFAKLAEPKYQALWREDASFLTRYAVYNSIVRKLNHAKMFATFTLPDATAHPIWTRFDKLGGNLHQYTFLFNEFGEGRHAIRFQKLLTVEDGVAKEVDDVTVPISMSAQLDDLLPRDPHELVALYFQDYGAEQHLAGEFGGAKIQYRRDQLNHLHARRGARDVYLNLSVRVQSQSEARGERRPPYAAVFRLVGDNHRAFVHFDKLSDYLAEHPDDGKLGSEGLLSGLRVMSVDLGLRTSASISVFRVARKDELKPNSEGRVPFCFPIEGNENLVAVHERSQLLKLPGETESKDLRAIREERQRTLRQLRTQLAYLRLLVRCGSEDVGRRERSWAKLIEQPMDANQMTPDWREAFEDELQKLKSLYGICGDREWTEAVYESVRRVWRHMGKQVRDWRKDVRSGERPKIRGYQKDVVGGNSIEQIEYLERQYKFLKSWSFFGKVSGQVIRAEKGSRFAITLREHIDHAKEDRLKKLADRIIMEALGYVYALDDERGKGKWVAKYPPCQLILLEELSEYQFNNDRPPSENNQLMQWSHRGVFQELLNQAQVHDLLVGTMYAAFSSRFDARTGAPGIRCRRVPARCAREQNPEPFPWWLNKFVAEHKLDGCPLRADDLIPTGEGEFFVSPFSAEEGDFHQIHADLNAAQNLQRRLWSDFDISQIRLRCDWGEVDGEPVLIPRTTGKRTADSYGNKVFYTKTGVTYYERERGKKRRKVFAQEELSEEEAELLVEADEAREKSVVLMRDPSGIINRGDWTRQKEFWSMVNQRIEGYLVKQIRSRVRLQESACENTGDI

SEQ ID NO: 255 - protein, 1140 aa, Bacillus hisashii
  REGION 1..1140: note = MISC_FEATURE - BhCas12b polypeptide sequence
MAPKKKRKVGIHGVPAAATRSFILKIEPNEEVKKGLWKTHEVLNHGIAYYMNILKLIRQEAIYEHHEQDPKNPKKVSKAEIQAELWDFVLKMQKCNSFTHEVDKDEVFNILRELYEELVPSSVEKKGEANQLSNKFLYPLVDPNSQSGKGTASSGRKPRWYNLKIAGDPSWEEEKKKWEEDKKKDPLAKILGKLAEYGLIPLFIPYTDSNEPIVKEIKWMEKSRNQSVRRLDKDMFIQALERFLSWESWNLKVKEEYEKVEKEYKTLEERIKEDIQALKALEQYEKERQEQLLRDTLNTNEYRLSKRGLRGWREIIQKWLKMDENEPSEKYLEVFKDYQRKHPREAGDYSVYEFLSKKENHFIWRNHPEYPYLYATFCEIDKKKKDAKQQATFTLADPINHPLWVRFEERSGSNLNKYRILTEQLHTEKLKKKLTVQLDRLIYPTESGGWEEKGKVDIVLLPSRQFYNQIFLDIEEKGKHAFTYKDESIKFPLKGTLGGARVQFDRDHLRRYPHKVESGNVGRIYFNMTVNIEPTESPVSKSLKIHRDDFPKVVNFKPKELTEWIKDSKGKKLKSGIESLEIGLRVMSIDLGQRQAAAASIFEVVDQKPDIEGKLFFPIKGTELYAVHRASFNIKLPGETLVKSREVLRKAREDNLKLMNQKLNFLRNVLHFQQFEDITEREKRVTKWISRQENSDVPLVYQDELIQIRELMYKPYKDWVAFLKQLHKRLEVEIGKEVKHWRKSLSDGRKGLYGISLKNIDEIDRTRKFLLRWSLRPTEPGEVRRLEPGQRFAIDQLNHLNALKEDRLKKMANTIIMHALGYCYDVRKKKWQAKNPACQIILFEDLSNYNPYEERSRFENSKLMKWSRREIPRQVALQGEIYGLQVGEVGAQFSSRFHAKTGSPGIRCSVVTKEKLQDNRFFKNLQREGRLTLDKIAVLKEGDLYPDKGGEKFISLSKDRKCVTTHADINAAQNLQKRFWTRTHGFYKVYCKAYQVDGQTVYIPESKDQKQKIIEEFGEGYFILKDGVYEWVNAGKLKIKKGSSKQSSSELVDSDILKDSFDLASELKGEKLMLYRDPSGNVFPSDKWMAAGVFFGKLERILISKLTNQYSISTIEDDSSKQSMKRPAATKKAGQAKKKK

SEQ ID NO: 256 - protein, 1108 aa, Bacillus thermoamylovorans
  REGION 1..1108: note = MISC_FEATURE - BTCas12b polypeptide sequence
MATRSFILKIEPNEEVKKGLWKTHEVLNHGIAYYMNILKLIRQEAIYEHHEQDPKNPKKVSKAEIQAELWDFVLKMQKCNSFTHEVDKDVVFNILRELYEELVPSSVEKKGEANQLSNKFLYPLVDPNSQSGKGTASSGRKPRWYNLKIAGDPSWEEEKKKWEEDKKKDPLAKILGKLAEYGLIPLFIPFTDSNEPIVKEIKWMEKSRNQSVRRLDKDMFIQALERFLSWESWNLKVKEEYEKVEKEHKTLEERIKEDIQAFKSLEQYEKERQEQLLRDTLNTNEYRLSKRGLRGWREIIQKWLKMDENEPSEKYLEVFKDYQRKHPREAGDYSVYEFLSKKENHFIWRNHPEYPYLYATFCEIDKKKKDAKQQATFTLADPINHPLWVRFEERSGSNLNKYRILTEQLHTEKLKKKLTVQLDRLIYPTESGGWEEKGKVDIVLLPSRQFYNQIFLDIEEKGKHAFTYKDESIKFPLKGTLGGARVQFDRDHLRRYPHKVESGNVGRIYFNMTVNIEPTESPVSKSLKIHRDDFPKFVNFKPKELTEWIKDSKGKKLKSGIESLEIGLRVMSIDLGQRQAAAASIFEVVDQKPDIEGKLFFPIKGTELYAVHRASFNIKLPGETLVKSREVLRKAREDNLKLMNQKLNFLRNVLHFQQFEDITEREKRVTKWISRQENSDVPLVYQDELIQIRELMYKPYKDWVAFLKQLHKRLEVEIGKEVKHWRKSLSDGRKGLYGISLKNIDEIDRTRKFLLRWSLRPTEPGEVRRLEPGQRFAIDQLNHLNALKEDRLKKMANTIIMHALGYCYDVRKKKWQAKNPACQIILFEDLSNYNPYEERSRFENSKLMKWSRREIPRQVALQGEIYGLQVGEVGAQFSSRFHAKTGSPGIRCSVVTKEKLQDNRFFKNLQREGRLTLDKIAVLKEGDLYPDKGGEKFISLSKDRKLVTTHADINAAQNLQKRFWTRTHGFYKVYCKAYQVDGQTVYIPESKDQKQKIIEEFGEGYFILKDGVYEWGNAGKLKIKKGSSKQSSSELVDSDILKDSFDLASELKGEKLMLYRDPSGNVFPSDKWMAAGVFFGKLERILISKLTNQYSISTIEDDSSKQSM

SEQ ID NO: 257 - protein, 1112 aa, Bacillus sp.
  REGION 1..1112: note = MISC_FEATURE - BvCas12b (Bacillus sp. V3-13) polypeptide sequence
MAIRSIKLKMKTNSGTDSIYLRKALWRTHQLINEGIAYYMNLLTLYRQEAIGDKTKEAYQAELINIIRNQQRNNGSSEEHGSDQEILALLRQLYELIIPSSIGESGDANQLGNKFLYPLVDPNSQSGKGTSNAGRKPRWKRLKEEGNPDWELEKKKDEERKAKDPTVKIFDNLNKYGLLPLFPLFTNIQKDIEWLPLGKRQSVRKWDKDMFIQAIERLLSWESWNRRVADEYKQLKEKTESYYKEHLTGGEEWIEKIRKFEKERNMELEKNAFAPNDGYFITSRQIRGWDRVYEKWSKLPESASPEELWKVVAEQQNKMSEGFGDPKVFSFLANRENRDIWRGHSERIYHIAAYNGLQKKLSRTKEQATFTLPDAIEHPLWIRYESPGGTNLNLFKLEEKQKKNYYVTLSKIIWPSEEKWIEKENIEIPLAPSIQFNRQIKLKQHVKGKQEISFSDYSSRISLDGVLGGSRIQFNRKYIKNHKELLGEGDIGPVFFNLVVDVAPLQETRNGRLQSPIGKALKVISSDFSKVIDYKPKELMDWMNTGSASNSFGVASLLEGMRVMSIDMGQRTSASVSIFEVVKELPKDQEQKLFYSINDTELFAIHKRSFLLNLPGEVVTKNNKQQRQERRKKRQFVRSQIRMLANVLRLETKKTPDERKKAIHKLMEIVQSYDSWTASQKEVWEKELNLLTNMAAFNDEIWKESLVELHHRIEPYVGQIVSKWRKGLSEGRKNLAGISMWNIDELEDTRRLLISWSKRSRTPGEANRIETDEPFGSSLLQHIQNVKDDRLKQMANLIIMTALGFKYDKEEKDRYKRWKETYPACQIILFENLNRYLFNLDRSRRENSRLMKWAHRSIPRTVSMQGEMFGLQVGDVRSEYSSRFHAKTGAPGIRCHALTEEDLKAGSNTLKRLIEDGFINESELAYLKKGDIIPSQGGELFVTLSKRYKKDSDNNELTVIHADINAAQNLQKRFWQQNSEVYRVPCQLARMGEDKLYIPKSQTETIKKYFGKGSFVKNNTEQEVYKWEKSEKMKIKTDTTFDLQDLDGFEDISKTIELAQEQQKKYLTMFRDPSGYFFNNETWRPQKEYWSIVNNIIKSCLKKKILSNKVEL

SEQ ID NO: 258 - DNA, 47 bp, synthetic construct
  misc_feature 1..47: note = 5'UTR oligonucleotide sequence
  source 1..47: mol_type = other DNA
gggaaataagagagaaaagaagagtaagaagaaatataagagccacc

SEQ ID NO: 259 - DNA, 101 bp, synthetic construct
  misc_feature 1..101: note = 3'UTR (TriLink standard UTR)polynucleotide sequence
  source 1..101: mol_type = other DNA
gctggagcctcggtggccatgcttcttgccccttgggcctccccccagcccctcctccccttcctgcacccgtacccccgtggtctttgaataaagtctga

SEQ ID NO: 260 - DNA, 3420 bp, Bacillus hisashii
  misc_feature 1..3420: note = bhCas12b (V4) polynucleotide sequence
  source 1..3420: mol_type = genomic DNA
atggccccaaagaagaagcggaaggtcggtatccacggagtcccagcagccgccaccagatccttcatcctgaagatcgagcccaacgaggaagtgaagaaaggcctctggaaaacccacgaggtgctgaaccacggaatcgcctactacatgaatatcctgaagctgatccggcaagaggccatctacgagcaccacgagcaggaccccaagaatcccaagaaggtgtccaaggccgagatccaggccgagctgtgggatttcgtgctgaagatgcagaagtgcaacagcttcacacacgaggtggacaaggacgaggtgttcaacatcctgagagagctgtacgaggaactggtgcccagcagcgtggaaaagaagggcgaagccaaccagctgagcaacaagtttctgtaccctctggtggaccccaacagccagtctggaaagggaacagccagcagcggcagaaagcccagatggtacaacctgaagattgccggcgatccctcctgggaagaagagaagaagaagtgggaagaagataagaaaaaggacccgctggccaagatcctgggcaagctggctgagtacggactgatccctctgttcatcccctacaccgacagcaacgagcccatcgtgaaagaaatcaagtggatggaaaagtcccggaaccagagcgtgcggcggctggataaggacatgttcattcaggccctggaacggttcctgagctgggagagctggaacctgaaagtgaaagaggaatacgagaaggtcgagaaagagtacaagaccctggaagagaggatcaaagaggacatccaggctctgaaggctctggaacagtatgagaaagagcggcaagaacagctgctgcgggacaccctgaacaccaacgagtaccggctgagcaagagaggccttagaggctggcgggaaatcatccagaaatggctgaaaatggacgagaacgagccctccgagaagtacctggaagtgttcaaggactaccagcggaagcaccctagagaggccggcgattacagcgtgtacgagttcctgtccaagaaagagaaccacttcatctggcggaatcaccctgagtacccctacctgtacgccaccttctgcgagatcgacaagaaaaagaaggacgccaagcagcaggccaccttcacactggccgatcctatcaatcaccctctgtgggtccgattcgaggaaagaagcggcagcaacctgaacaagtacagaatcctgaccgagcagctgcacaccgagaagctgaagaaaaagctgacagtgcagctggaccggctgatctaccctacagaatctggcggctgggaagagaagggcaaagtggacattgtgctgctgcccagccggcagttctacaaccagatcttcctggacatcgaggaaaagggcaagcacgccttcacctacaaggatgagagcatcaagttccctctgaagggcacactcggcggagccagagtgcagttcgacagagatcacctgagaagataccctcacaaggtggaaagcggcaacgtgggcagaatctacttcaacatgaccgtgaacatcgagcctacagagtccccagtgtccaagtctctgaagatccaccgggacgacttccccaaggtggtcaacttcaagcccaaagaactgaccgagtggatcaaggacagcaagggcaagaaactgaagtccggcatcgagtccctggaaatcggcctgagagtgatgagcatcgacctgggacagagacaggccgctgccgcctctattttcgaggtggtggatcagaagcccgacatcgaaggcaagctgtttttcccaatcaagggcaccgagctgtatgccgtgcacagagccagcttcaacatcaagctgcccggcgagacactggtcaagagcagagaagtgctgcggaaggccagagaggacaatctgaaactgatgaaccagaagctcaacttcctgcggaacgtgctgcacttccagcagttcgaggacatcaccgagagagagaagcgggtcaccaagtggatcagcagacaagagaacagcgacgtgcccctggtgtaccaggatgagctgatccagatccgcgagctgatgtacaagccttacaaggactgggtcgccttcctgaagcagctccacaagagactggaagtcgagatcggcaaagaagtgaagcactggcggaagtccctgagcgacggaagaaagggcctgtacggcatctccctgaagaacatcgacgagatcgatcggacccggaagttcctgctgagatggtccctgaggcctaccgaacctggcgaagtgcgtagactggaacccggccagagattcgccatcgaccagctgaatcacctgaacgccctgaaagaagatcggctgaagaagatggccaacaccatcatcatgcacgccctgggctactgctacgacgtgcggaagaagaaatggcaggctaagaaccccgcctgccagatcatcctgttcgaggatctgagcaactacaacccctacgaggaaaggtcccgcttcgagaacagcaagctcatgaagtggtccagacgcgagatccccagacaggttgcactgcagggcgagatctatggcctgcaagtgggagaagtgggcgctcagttcagcagcagattccacgccaagacaggcagccctggcatcagatgtagcgtcgtgaccaaagagaagctgcaggacaatcggttcttcaagaatctgcagagagagggcagactgaccctggacaaaatcgccgtgctgaaagagggcgatctgtacccagacaaaggcggcgagaagttcatcagcctgagcaaggatcggaagtgcgtgaccacacacgccgacatcaacgccgctcagaacctgcagaagcggttctggacaagaacccacggcttctacaaggtgtactgcaaggcctaccaggtggacggccagaccgtgtacatccctgagagcaaggaccagaagcagaagatcatcgaagagttcggcgagggctacttcattctgaaggacggggtgtacgaatgggtcaacgccggcaagctgaaaatcaagaagggcagctccaagcagagcagcagcgagctggtggatagcgacatcctgaaagacagcttcgacctggcctccgagctgaaaggcgaaaagctgatgctgtacagggaccccagcggcaatgtgttccccagcgacaaatggatggccgctggcgtgttcttcggaaagctggaacgcatcctgatcagcaagctgaccaaccagtactccatcagcaccatcgaggacgacagcagcaagcagtctatgaaaaggccggcggccacgaaaaaggccggccaggcaaaaaagaaaaag

SEQ ID NO: 261 - protein, 17 aa, synthetic construct
  REGION 1..17: note = synthetic peptide sequence
MAPKKKRKVGIHGVPAA

SEQ ID NO: 262 - DNA, 51 bp, synthetic construct
  misc_feature 1..51: note = synthetic oligonucleotide sequence
  source 1..51: mol_type = other DNA
atggccccaaagaagaagcggaaggtcggtatccacggagtcccagcagcc

SEQ ID NO: 263 - protein, 1554 aa, synthetic construct
  REGION 1..1554: note = 101 Cas9 TadAins 1015 polypeptide sequence
MDKKYSIGLAIGTNSVGWAVITDEYKVPSKKFKVLGNTDRHSIKKNLIGALLFDSGETAEATRLKRTARRRYTRRKNRICYLQEIFSNEMAKVDDSFFHRLEESFLVEEDKKHERHPIFGNIVDEVAYHEKYPTIYHLRKKLVDSTDKADLRLIYLALAHMIKFRGHFLIEGDLNPDNSDVDKLFIQLVQTYNQLFEENPINASGVDAKAILSARLSKSRRLENLIAQLPGEKKNGLFGNLIALSLGLTPNFKSNFDLAEDAKLQLSKDTYDDDLDNLLAQIGDQYADLFLAAKNLSDAILLSDILRVNTEITKAPLSASMIKRYDEHHQDLTLLKALVRQQLPEKYKEIFFDQSKNGYAGYIDGGASQEEFYKFIKPILEKMDGTEELLVKLNREDLLRKQRTFDNGSIPHQIHLGELHAILRRQEDFYPFLKDNREKIEKILTFRIPYYVGPLARGNSRFAWMTRKSEETITPWNFEEVVDKGASAQSFIERMTNFDKNLPNEKVLPKHSLLYEYFTVYNELTKVKYVTEGMRKPAFLSGEQKKAIVDLLFKTNRKVTVKQLKEDYFKKIECFDSVEISGVEDRFNASLGTYHDLLKIIKDKDFLDNEENEDILEDIVLTLTLFEDREMIEERLKTYAHLFDDKVMKQLKRRRYTGWGRLSRKLINGIRDKQSGKTILDFLKSDGFANRNFMQLIHDDSLTFKEDIQKAQVSGQGDSLHEHIANLAGSPAIKKGILQTVKVVDELVKVMGRHKPENIVIEMARENQTTQKGQKNSRERMKRIEEGIKELGSQILKEHPVENTQLQNEKLYLYYLQNGRDMYVDQELDINRLSDYDVDHIVPQSFLKDDSIDNKVLTRSDKNRGKSDNVPSEEVVKKMKNYWRQLLNAKLITQRKFDNLTKAERGGLSELDKAGFIKRQLVETRQITKHVAQILDSRMNTKYDENDKLIREVKVITLKSKLVSDFRKDFQFYKVREINNYHHAHDAYLNAVVGTALIKKYPKLESEFVYGDYKVGSSGSETPGTSESATPESSGSEVEFSHEYWMRHALTLAKRARDEREVPVGAVLVLNNRVIGEGWNRAIGLHDPTAHAEIMALRQGGLVMQNYRLIDATLYVTFEPCVMCAGAMIHSRIGRVVFGVRNAKTGAAGSLMDVLHYPGMNHRVEITEGILADECAALLCYFFRMPRQVFNAQKKAQSSTDYDVRKMIAKSEQEIGKATAKYFFYSNIMNFFKTEITLANGEIRKRPLIETNGETGEIVWDKGRDFATVRKVLSMPQVNIVKKTEVQTGGFSKESILPKRNSDKLIARKKDWDPKKYGGFDSPTVAYSVLVVAKVEKGKSKKLKSVKELLGITIMERSSFEKNPIDFLEAKGYKEVKKDLIIKLPKYSLFELENGRKRMLASAGELQKGNELALPSKYVNFLYLASHYEKLKGSPEDNEQKQLFVEQHKHYLDEIIEQISEFSKRVILADANLDKVLSAYNKHRDKPIREQAENIIHLFTLTNLGAPAAFKYFDTTIDRKRYTSTKEVLDATLIHQSITGLYETRIDLSQLGGD

SEQ ID NO: 264 - protein, 1554 aa, synthetic construct
  REGION 1..1554: note = 102 Cas9 TadAins 1022 polypeptide sequence
MDKKYSIGLAIGTNSVGWAVITDEYKVPSKKFKVLGNTDRHSIKKNLIGALLFDSGETAEATRLKRTARRRYTRRKNRICYLQEIFSNEMAKVDDSFFHRLEESFLVEEDKKHERHPIFGNIVDEVAYHEKYPTIYHLRKKLVDSTDKADLRLIYLALAHMIKFRGHFLIEGDLNPDNSDVDKLFIQLVQTYNQLFEENPINASGVDAKAILSARLSKSRRLENLIAQLPGEKKNGLFGNLIALSLGLTPNFKSNFDLAEDAKLQLSKDTYDDDLDNLLAQIGDQYADLFLAAKNLSDAILLSDILRVNTEITKAPLSASMIKRYDEHHQDLTLLKALVRQQLPEKYKEIFFDQSKNGYAGYIDGGASQEEFYKFIKPILEKMDGTEELLVKLNREDLLRKQRTFDNGSIPHQIHLGELHAILRRQEDFYPFLKDNREKIEKILTFRIPYYVGPLARGNSRFAWMTRKSEETITPWNFEEVVDKGASAQSFIERMTNFDKNLPNEKVLPKHSLLYEYFTVYNELTKVKYVTEGMRKPAFLSGEQKKAIVDLLFKTNRKVTVKQLKEDYFKKIECFDSVEISGVEDRFNASLGTYHDLLKIIKDKDFLDNEENEDILEDIVLTLTLFEDREMIEERLKTYAHLFDDKVMKQLKRRRYTGWGRLSRKLINGIRDKQSGKTILDFLKSDGFANRNFMQLIHDDSLTFKEDIQKAQVSGQGDSLHEHIANLAGSPAIKKGILQTVKVVDELVKVMGRHKPENIVIEMARENQTTQKGQKNSRERMKRIEEGIKELGSQILKEHPVENTQLQNEKLYLYYLQNGRDMYVDQELDINRLSDYDVDHIVPQSFLKDDSIDNKVLTRSDKNRGKSDNVPSEEVVKKMKNYWRQLLNAKLITQRKFDNLTKAERGGLSELDKAGFIKRQLVETRQITKHVAQILDSRMNTKYDENDKLIREVKVITLKSKLVSDFRKDFQFYKVREINNYHHAHDAYLNAVVGTALIKKYPKLESEFVYGDYKVYDVRKMIGSSGSETPGTSESATPESSGSEVEFSHEYWMRHALTLAKRARDEREVPVGAVLVLNNRVIGEGWNRAIGLHDPTAHAEIMALRQGGLVMQNYRLIDATLYVTFEPCVMCAGAMIHSRIGRVVFGVRNAKTGAAGSLMDVLHYPGMNHRVEITEGILADECAALLCYFFRMPRQVFNAQKKAQSSTDAKSEQEIGKATAKYFFYSNIMNFFKTEITLANGEIRKRPLIETNGETGEIVWDKGRDFATVRKVLSMPQVNIVKKTEVQTGGFSKESILPKRNSDKLIARKKDWDPKKYGGFDSPTVAYSVLVVAKVEKGKSKKLKSVKELLGITIMERSSFEKNPIDFLEAKGYKEVKKDLIIKLPKYSLFELENGRKRMLASAGELQKGNELALPSKYVNFLYLASHYEKLKGSPEDNEQKQLFVEQHKHYLDEIIEQISEFSKRVILADANLDKVLSAYNKHRDKPIREQAENIIHLFTLTNLGAPAAFKYFDTTIDRKRYTSTKEVLDATLIHQSITGLYETRIDLSQLGGD

SEQ ID NO: 265 - protein, 1554 aa, synthetic construct
  REGION 1..1554: note = 103 Cas9 TadAins 1029 polypeptide sequence
MDKKYSIGLAIGTNSVGWAVITDEYKVPSKKFKVLGNTDRHSIKKNLIGALLFDSGETAEATRLKRTARRRYTRRKNRICYLQEIFSNEMAKVDDSFFHRLEESFLVEEDKKHERHPIFGNIVDEVAYHEKYPTIYHLRKKLVDSTDKADLRLIYLALAHMIKFRGHFLIEGDLNPDNSDVDKLFIQLVQTYNQLFEENPINASGVDAKAILSARLSKSRRLENLIAQLPGEKKNGLFGNLIALSLGLTPNFKSNFDLAEDAKLQLSKDTYDDDLDNLLAQIGDQYADLFLAAKNLSDAILLSDILRVNTEITKAPLSASMIKRYDEHHQDLTLLKALVRQQLPEKYKEIFFDQSKNGYAGYIDGGASQEEFYKFIKPILEKMDGTEELLVKLNREDLLRKQRTFDNGSIPHQIHLGELHAILRRQEDFYPFLKDNREKIEKILTFRIPYYVGPLARGNSRFAWMTRKSEETITPWNFEEVVDKGASAQSFIERMTNFDKNLPNEKVLPKHSLLYEYFTVYNELTKVKYVTEGMRKPAFLSGEQKKAIVDLLFKTNRKVTVKQLKEDYFKKIECFDSVEISGVEDRFNASLGTYHDLLKIIKDKDFLDNEENEDILEDIVLTLTLFEDREMIEERLKTYAHLFDDKVMKQLKRRRYTGWGRLSRKLINGIRDKQSGKTILDFLKSDGFANRNFMQLIHDDSLTFKEDIQKAQVSGQGDSLHEHIANLAGSPAIKKGILQTVKVVDELVKVMGRHKPENIVIEMARENQTTQKGQKNSRERMKRIEEGIKELGSQILKEHPVENTQLQNEKLYLYYLQNGRDMYVDQELDINRLSDYDVDHIVPQSFLKDDSIDNKVLTRSDKNRGKSDNVPSEEVVKKMKNYWRQLLNAKLITQRKFDNLTKAERGGLSELDKAGFIKRQLVETRQITKHVAQILDSRMNTKYDENDKLIREVKVITLKSKLVSDFRKDFQFYKVREINNYHHAHDAYLNAVVGTALIKKYPKLESEFVYGDYKVYDVRKMIAKSEQEIGSSGSETPGTSESATPESSGSEVEFSHEYWMRHALTLAKRARDEREVPVGAVLVLNNRVIGEGWNRAIGLHDPTAHAEIMALRQGGLVMQNYRLIDATLYVTFEPCVMCAGAMIHSRIGRVVFGVRNAKTGAAGSLMDVLHYPGMNHRVEITEGILADECAALLCYFFRMPRQVFNAQKKAQSSTDGKATAKYFFYSNIMNFFKTEITLANGEIRKRPLIETNGETGEIVWDKGRDFATVRKVLSMPQVNIVKKTEVQTGGFSKESILPKRNSDKLIARKKDWDPKKYGGFDSPTVAYSVLVVAKVEKGKSKKLKSVKELLGITIMERSSFEKNPIDFLEAKGYKEVKKDLIIKLPKYSLFELENGRKRMLASAGELQKGNELALPSKYVNFLYLASHYEKLKGSPEDNEQKQLFVEQHKHYLDEIIEQISEFSKRVILADANLDKVLSAYNKHRDKPIREQAENIIHLFTLTNLGAPAAFKYFDTTIDRKRYTSTKEVLDATLIHQSITGLYETRIDLSQLGGD

SEQ ID NO: 266 - protein, 1554 aa, synthetic construct
  REGION 1..1554: note = 103 Cas9 TadAins 1040 polypeptide sequence
MDKKYSIGLAIGTNSVGWAVITDEYKVPSKKFKVLGNTDRHSIKKNLIGALLFDSGETAEATRLKRTARRRYTRRKNRICYLQEIFSNEMAKVDDSFFHRLEESFLVEEDKKHERHPIFGNIVDEVAYHEKYPTIYHLRKKLVDSTDKADLRLIYLALAHMIKFRGHFLIEGDLNPDNSDVDKLFIQLVQTYNQLFEENPINASGVDAKAILSARLSKSRRLENLIAQLPGEKKNGLFGNLIALSLGLTPNFKSNFDLAEDAKLQLSKDTYDDDLDNLLAQIGDQYADLFLAAKNLSDAILLSDILRVNTEITKAPLSASMIKRYDEHHQDLTLLKALVRQQLPEKYKEIFFDQSKNGYAGYIDGGASQEEFYKFIKPILEKMDGTEELLVKLNREDLLRKQRTFDNGSIPHQIHLGELHAILRRQEDFYPFLKDNREKIEKILTFRIPYYVGPLARGNSRFAWMTRKSEETITPWNFEEVVDKGASAQSFIERMTNFDKNLPNEKVLPKHSLLYEYFTVYNELTKVKYVTEGMRKPAFLSGEQKKAIVDLLFKTNRKVTVKQLKEDYFKKIECFDSVEISGVEDRFNASLGTYHDLLKIIKDKDFLDNEENEDILEDIVLTLTLFEDREMIEERLKTYAHLFDDKVMKQLKRRRYTGWGRLSRKLINGIRDKQSGKTILDFLKSDGFANRNFMQLIHDDSLTFKEDIQKAQVSGQGDSLHEHIANLAGSPAIKKGILQTVKVVDELVKVMGRHKPENIVIEMARENQTTQKGQKNSRERMKRIEEGIKELGSQILKEHPVENTQLQNEKLYLYYLQNGRDMYVDQELDINRLSDYDVDHIVPQSFLKDDSIDNKVLTRSDKNRGKSDNVPSEEVVKKMKNYWRQLLNAKLITQRKFDNLTKAERGGLSELDKAGFIKRQLVETRQITKHVAQILDSRMNTKYDENDKLIREVKVITLKSKLVSDFRKDFQFYKVREINNYHHAHDAYLNAVVGTALIKKYPKLESEFVYGDYKVYDVRKMIAKSEQEIGKATAKYFFYSGSSGSETPGTSESATPESSGSEVEFSHEYWMRHALTLAKRARDEREVPVGAVLVLNNRVIGEGWNRAIGLHDPTAHAEIMALRQGGLVMQNYRLIDATLYVTFEPCVMCAGAMIHSRIGRVVFGVRNAKTGAAGSLMDVLHYPGMNHRVEITEGILADECAALLCYFFRMPRQVFNAQKKAQSSTDNIMNFFKTEITLANGEIRKRPLIETNGETGEIVWDKGRDFATVRKVLSMPQVNIVKKTEVQTGGFSKESILPKRNSDKLIARKKDWDPKKYGGFDSPTVAYSVLVVAKVEKGKSKKLKSVKELLGITIMERSSFEKNPIDFLEAKGYKEVKKDLIIKLPKYSLFELENGRKRMLASAGELQKGNELALPSKYVNFLYLASHYEKLKGSPEDNEQKQLFVEQHKHYLDEIIEQISEFSKRVILADANLDKVLSAYNKHRDKPIREQAENIIHLFTLTNLGAPAAFKYFDTTIDRKRYTSTKEVLDATLIHQSITGLYETRIDLSQLGGD

SEQ ID NO: 267 - protein, 1554 aa, synthetic construct
  REGION 1..1554: note = 105 Cas9 TadAins 1068 polypeptide sequence
MDKKYSIGLAIGTNSVGWAVITDEYKVPSKKFKVLGNTDRHSIKKNLIGALLFDSGETAEATRLKRTARRRYTRRKNRICYLQEIFSNEMAKVDDSFFHRLEESFLVEEDKKHERHPIFGNIVDEVAYHEKYPTIYHLRKKLVDSTDKADLRLIYLALAHMIKFRGHFLIEGDLNPDNSDVDKLFIQLVQTYNQLFEENPINASGVDAKAILSARLSKSRRLENLIAQLPGEKKNGLFGNLIALSLGLTPNFKSNFDLAEDAKLQLSKDTYDDDLDNLLAQIGDQYADLFLAAKNLSDAILLSDILRVNTEITKAPLSASMIKRYDEHHQDLTLLKALVRQQLPEKYKEIFFDQSKNGYAGYIDGGASQEEFYKFIKPILEKMDGTEELLVKLNREDLLRKQRTFDNGSIPHQIHLGELHAILRRQEDFYPFLKDNREKIEKILTFRIPYYVGPLARGNSRFAWMTRKSEETITPWNFEEVVDKGASAQSFIERMTNFDKNLPNEKVLPKHSLLYEYFTVYNELTKVKYVTEGMRKPAFLSGEQKKAIVDLLFKTNRKVTVKQLKEDYFKKIECFDSVEISGVEDRFNASLGTYHDLLKIIKDKDFLDNEENEDILEDIVLTLTLFEDREMIEERLKTYAHLFDDKVMKQLKRRRYTGWGRLSRKLINGIRDKQSGKTILDFLKSDGFANRNFMQLIHDDSLTFKEDIQKAQVSGQGDSLHEHIANLAGSPAIKKGILQTVKVVDELVKVMGRHKPENIVIEMARENQTTQKGQKNSRERMKRIEEGIKELGSQILKEHPVENTQLQNEKLYLYYLQNGRDMYVDQELDINRLSDYDVDHIVPQSFLKDDSIDNKVLTRSDKNRGKSDNVPSEEVVKKMKNYWRQLLNAKLITQRKFDNLTKAERGGLSELDKAGFIKRQLVETRQITKHVAQILDSRMNTKYDENDKLIREVKVITLKSKLVSDFRKDFQFYKVREINNYHHAHDAYLNAVVGTALIKKYPKLESEFVYGDYKVYDVRKMIAKSEQEIGKATAKYFFYSNIMNFFKTEITLANGEIRKRPLIETNGEGSSGSETPGTSESATPESSGSEVEFSHEYWMRHALTLAKRARDEREVPVGAVLVLNNRVIGEGWNRAIGLHDPTAHAEIMALRQGGLVMQNYRLIDATLYVTFEPCVMCAGAMIHSRIGRVVFGVRNAKTGAAGSLMDVLHYPGMNHRVEITEGILADECAALLCYFFRMPRQVFNAQKKAQSSTDTGEIVWDKGRDFATVRKVLSMPQVNIVKKTEVQTGGFSKESILPKRNSDKLIARKKDWDPKKYGGFDSPTVAYSVLVVAKVEKGKSKKLKSVKELLGITIMERSSFEKNPIDFLEAKGYKEVKKDLIIKLPKYSLFELENGRKRMLASAGELQKGNELALPSKYVNFLYLASHYEKLKGSPEDNEQKQLFVEQHKHYLDEIIEQISEFSKRVILADANLDKVLSAYNKHRDKPIREQAENIIHLFTLTNLGAPAAFKYFDTTIDRKRYTSTKEVLDATLIHQSITGLYETRIDLSQLGGD

SEQ ID NO: 268 - protein, 1554 aa, synthetic construct
  REGION 1..1554: note = 106 Cas9 TadAins 1247 polypeptide sequence
MDKKYSIGLAIGTNSVGWAVITDEYKVPSKKFKVLGNTDRHSIKKNLIGALLFDSGETAEATRLKRTARRRYTRRKNRICYLQEIFSNEMAKVDDSFFHRLEESFLVEEDKKHERHPIFGNIVDEVAYHEKYPTIYHLRKKLVDSTDKADLRLIYLALAHMIKFRGHFLIEGDLNPDNSDVDKLFIQLVQTYNQLFEENPINASGVDAKAILSARLSKSRRLENLIAQLPGEKKNGLFGNLIALSLGLTPNFKSNFDLAEDAKLQLSKDTYDDDLDNLLAQIGDQYADLFLAAKNLSDAILLSDILRVNTEITKAPLSASMIKRYDEHHQDLTLLKALVRQQLPEKYKEIFFDQSKNGYAGYIDGGASQEEFYKFIKPILEKMDGTEELLVKLNREDLLRKQRTFDNGSIPHQIHLGELHAILRRQEDFYPFLKDNREKIEKILTFRIPYYVGPLARGNSRFAWMTRKSEETITPWNFEEVVDKGASAQSFIERMTNFDKNLPNEKVLPKHSLLYEYFTVYNELTKVKYVTEGMRKPAFLSGEQKKAIVDLLFKTNRKVTVKQLKEDYFKKIECFDSVEISGVEDRFNASLGTYHDLLKIIKDKDFLDNEENEDILEDIVLTLTLFEDREMIEERLKTYAHLFDDKVMKQLKRRRYTGWGRLSRKLINGIRDKQSGKTILDFLKSDGFANRNFMQLIHDDSLTFKEDIQKAQVSGQGDSLHEHIANLAGSPAIKKGILQTVKVVDELVKVMGRHKPENIVIEMARENQTTQKGQKNSRERMKRIEEGIKELGSQILKEHPVENTQLQNEKLYLYYLQNGRDMYVDQELDINRLSDYDVDHIVPQSFLKDDSIDNKVLTRSDKNRGKSDNVPSEEVVKKMKNYWRQLLNAKLITQRKFDNLTKAERGGLSELDKAGFIKRQLVETRQITKHVAQILDSRMNTKYDENDKLIREVKVITLKSKLVSDFRKDFQFYKVREINNYHHAHDAYLNAVVGTALIKKYPKLESEFVYGDYKVYDVRKMIAKSEQEIGKATAKYFFYSNIMNFFKTEITLANGEIRKRPLIETNGETGEIVWDKGRDFATVRKVLSMPQVNIVKKTEVQTGGFSKESILPKRNSDKLIARKKDWDPKKYGGFDSPTVAYSVLVVAKVEKGKSKKLKSVKELLGITIMERSSFEKNPIDFLEAKGYKEVKKDLIIKLPKYSLFELENGRKRMLASAGELQKGNELALPSKYVNFLYLASHYEKLKGGSSGSETPGTSESATPESSGSEVEFSHEYWMRHALTLAKRARDEREVPVGAVLVLNNRVIGEGWNRAIGLHDPTAHAEIMALRQGGLVMQNYRLIDATLYVTFEPCVMCAGAMIHSRIGRVVFGVRNAKTGAAGSLMDVLHYPGMNHRVEITEGILADECAALLCYFFRMPRQVFNAQKKAQSSTDSPEDNEQKQLFVEQHKHYLDEIIEQISEFSKRVILADANLDKVLSAYNKHRDKPIREQAENIIHLFTLTNLGAPAAFKYFDTTIDRKRYTSTKEVLDATLIHQSITGLYETRIDLSQLGGD

SEQ ID NO: 269 - protein, 1554 aa, synthetic construct
  REGION 1..1554: note = 107 Cas9 TadAins 1054 polypeptide sequence
MDKKYSIGLAIGTNSVGWAVITDEYKVPSKKFKVLGNTDRHSIKKNLIGALLFDSGETAEATRLKRTARRRYTRRKNRICYLQEIFSNEMAKVDDSFFHRLEESFLVEEDKKHERHPIFGNIVDEVAYHEKYPTIYHLRKKLVDSTDKADLRLIYLALAHMIKFRGHFLIEGDLNPDNSDVDKLFIQLVQTYNQLFEENPINASGVDAKAILSARLSKSRRLENLIAQLPGEKKNGLFGNLIALSLGLTPNFKSNFDLAEDAKLQLSKDTYDDDLDNLLAQIGDQYADLFLAAKNLSDAILLSDILRVNTEITKAPLSASMIKRYDEHHQDLTLLKALVRQQLPEKYKEIFFDQSKNGYAGYIDGGASQEEFYKFIKPILEKMDGTEELLVKLNREDLLRKQRTFDNGSIPHQIHLGELHAILRRQEDFYPFLKDNREKIEKILTFRIPYYVGPLARGNSRFAWMTRKSEETITPWNFEEVVDKGASAQSFIERMTNFDKNLPNEKVLPKHSLLYEYFTVYNELTKVKYVTEGMRKPAFLSGEQKKAIVDLLFKTNRKVTVKQLKEDYFKKIECFDSVEISGVEDRFNASLGTYHDLLKIIKDKDFLDNEENEDILEDIVLTLTLFEDREMIEERLKTYAHLFDDKVMKQLKRRRYTGWGRLSRKLINGIRDKQSGKTILDFLKSDGFANRNFMQLIHDDSLTFKEDIQKAQVSGQGDSLHEHIANLAGSPAIKKGILQTVKVVDELVKVMGRHKPENIVIEMARENQTTQKGQKNSRERMKRIEEGIKELGSQILKEHPVENTQLQNEKLYLYYLQNGRDMYVDQELDINRLSDYDVDHIVPQSFLKDDSIDNKVLTRSDKNRGKSDNVPSEEVVKKMKNYWRQLLNAKLITQRKFDNLTKAERGGLSELDKAGFIKRQLVETRQITKHVAQILDSRMNTKYDENDKLIREVKVITLKSKLVSDFRKDFQFYKVREINNYHHAHDAYLNAVVGTALIKKYPKLESEFVYGDYKVYDVRKMIAKSEQEIGKATAKYFFYSNIMNFFKTEITLANGSSGSETPGTSESATPESSGSEVEFSHEYWMRHALTLAKRARDEREVPVGAVLVLNNRVIGEGWNRAIGLHDPTAHAEIMALRQGGLVMQNYRLIDATLYVTFEPCVMCAGAMIHSRIGRVVFGVRNAKTGAAGSLMDVLHYPGMNHRVEITEGILADECAALLCYFFRMPRQVFNAQKKAQSSTDGEIRKRPLIETNGETGEIVWDKGRDFATVRKVLSMPQVNIVKKTEVQTGGFSKESILPKRNSDKLIARKKDWDPKKYGGFDSPTVAYSVLVVAKVEKGKSKKLKSVKELLGITIMERSSFEKNPIDFLEAKGYKEVKKDLIIKLPKYSLFELENGRKRMLASAGELQKGNELALPSKYVNFLYLASHYEKLKGSPEDNEQKQLFVEQHKHYLDEIIEQISEFSKRVILADANLDKVLSAYNKHRDKPIREQAENIIHLFTLTNLGAPAAFKYFDTTIDRKRYTSTKEVLDATLIHQSITGLYETRIDLSQLGGD

SEQ ID NO: 270 - protein, 1554 aa, synthetic construct
  REGION 1..1554: note = 108 Cas9 TadAins 1026 polypeptide sequence
MDKKYSIGLAIGTNSVGWAVITDEYKVPSKKFKVLGNTDRHSIKKNLIGALLFDSGETAEATRLKRTARRRYTRRKNRICYLQEIFSNEMAKVDDSFFHRLEESFLVEEDKKHERHPIFGNIVDEVAYHEKYPTIYHLRKKLVDSTDKADLRLIYLALAHMIKFRGHFLIEGDLNPDNSDVDKLFIQLVQTYNQLFEENPINASGVDAKAILSARLSKSRRLENLIAQLPGEKKNGLFGNLIALSLGLTPNFKSNFDLAEDAKLQLSKDTYDDDLDNLLAQIGDQYADLFLAAKNLSDAILLSDILRVNTEITKAPLSASMIKRYDEHHQDLTLLKALVRQQLPEKYKEIFFDQSKNGYAGYIDGGASQEEFYKFIKPILEKMDGTEELLVKLNREDLLRKQRTFDNGSIPHQIHLGELHAILRRQEDFYPFLKDNREKIEKILTFRIPYYVGPLARGNSRFAWMTRKSEETITPWNFEEVVDKGASAQSFIERMTNFDKNLPNEKVLPKHSLLYEYFTVYNELTKVKYVTEGMRKPAFLSGEQKKAIVDLLFKTNRKVTVKQLKEDYFKKIECFDSVEISGVEDRFNASLGTYHDLLKIIKDKDFLDNEENEDILEDIVLTLTLFEDREMIEERLKTYAHLFDDKVMKQLKRRRYTGWGRLSRKLINGIRDKQSGKTILDFLKSDGFANRNFMQLIHDDSLTFKEDIQKAQVSGQGDSLHEHIANLAGSPAIKKGILQTVKVVDELVKVMGRHKPENIVIEMARENQTTQKGQKNSRERMKRIEEGIKELGSQILKEHPVENTQLQNEKLYLYYLQNGRDMYVDQELDINRLSDYDVDHIVPQSFLKDDSIDNKVLTRSDKNRGKSDNVPSEEVVKKMKNYWRQLLNAKLITQRKFDNLTKAERGGLSELDKAGFIKRQLVETRQITKHVAQILDSRMNTKYDENDKLIREVKVITLKSKLVSDFRKDFQFYKVREINNYHHAHDAYLNAVVGTALIKKYPKLESEFVYGDYKVYDVRKMIAKSEGSSGSETPGTSESATPESSGSEVEFSHEYWMRHALTLAKRARDEREVPVGAVLVLNNRVIGEGWNRAIGLHDPTAHAEIMALRQGGLVMQNYRLIDATLYVTFEPCVMCAGAMIHSRIGRVVFGVRNAKTGAAGSLMDVLHYPGMNHRVEITEGILADECAALLCYFFRMPRQVFNAQKKAQSSTDQEIGKATAKYFFYSNIMNFFKTEITLANGEIRKRPLIETNGETGEIVWDKGRDFATVRKVLSMPQVNIVKKTEVQTGGFSKESILPKRNSDKLIARKKDWDPKKYGGFDSPTVAYSVLVVAKVEKGKSKKLKSVKELLGITIMERSSFEKNPIDFLEAKGYKEVKKDLIIKLPKYSLFELENGRKRMLASAGELQKGNELALPSKYVNFLYLASHYEKLKGSPEDNEQKQLFVEQHKHYLDEIIEQISEFSKRVILADANLDKVLSAYNKHRDKPIREQAENIIHLFTLTNLGAPAAFKYFDTTIDRKRYTSTKEVLDATLIHQSITGLYETRIDLSQLGGD

SEQ ID NO: 271 - protein, 1540 aa, synthetic construct
  REGION 1..1540: note = 109 Cas9 TadAins 768 polypeptide sequence
MDKKYSIGLAIGTNSVGWAVITDEYKVPSKKFKVLGNTDRHSIKKNLIGALLFDSGETAEATRLKRTARRRYTRRKNRICYLQEIFSNEMAKVDDSFFHRLEESFLVEEDKKHERHPIFGNIVDEVAYHEKYPTIYHLRKKLVDSTDKADLRLIYLALAHMIKFRGHFLIEGDLNPDNSDVDKLFIQLVQTYNQLFEENPINASGVDAKAILSARLSKSRRLENLIAQLPGEKKNGLFGNLIALSLGLTPNFKSNFDLAEDAKLQLSKDTYDDDLDNLLAQIGDQYADLFLAAKNLSDAILLSDILRVNTEITKAPLSASMIKRYDEHHQDLTLLKALVRQQLPEKYKEIFFDQSKNGYAGYIDGGASQEEFYKFIKPILEKMDGTEELLVKLNREDLLRKQRTFDNGSIPHQIHLGELHAILRRQEDFYPFLKDNREKIEKILTFRIPYYVGPLARGNSRFAWMTRKSEETITPWNFEEVVDKGASAQSFIERMTNFDKNLPNEKVLPKHSLLYEYFTVYNELTKVKYVTEGMRKPAFLSGEQKKAIVDLLFKTNRKVTVKQLKEDYFKKIECFDSVEISGVEDRFNASLGTYHDLLKIIKDKDFLDNEENEDILEDIVLTLTLFEDREMIEERLKTYAHLFDDKVMKQLKRRRYTGWGRLSRKLINGIRDKQSGKTILDFLKSDGFANRNFMQLIHDDSLTFKEDIQKAQVSGQGDSLHEHIANLAGSPAIKKGILQTVKVVDELVKVMGRHKPENIVIEMARENQGSSGSETPGTSESATPESSGSEVEFSHEYWMRHALTLAKRARDEREVPVGAVLVLNNRVIGEGWNRAIGLHDPTAHAEIMALRQGGLVMQNYRLIDATLYVTFEPCVMCAGAMIHSRIGRVVFGVRNAKTGAAGSLMDVLHYPGMNHRVEITEGILADECAALLCYFFRMPRTTQKGQKNSRERMKRIEEGIKELGSQILKEHPVENTQLQNEKLYLYYLQNGRDMYVDQELDINRLSDYDVDHIVPQSFLKDDSIDNKVLTRSDKNRGKSDNVPSEEVVKKMKNYWRQLLNAKLITQRKFDNLTKAERGGLSELDKAGFIKRQLVETRQITKHVAQILDSRMNTKYDENDKLIREVKVITLKSKLVSDFRKDFQFYKVREINNYHHAHDAYLNAVVGTALIKKYPKLESEFVYGDYKVYDVRKMIAKSEQEIGKATAKYFFYSNIMNFFKTEITLANGEIRKRPLIETNGETGEIVWDKGRDFATVRKVLSMPQVNIVKKTEVQTGGFSKESILPKRNSDKLIARKKDWDPKKYGGFDSPTVAYSVLVVAKVEKGKSKKLKSVKELLGITIMERSSFEKNPIDFLEAKGYKEVKKDLIIKLPKYSLFELENGRKRMLASAGELQKGNELALPSKYVNFLYLASHYEKLKGSPEDNEQKQLFVEQHKHYLDEIIEQISEFSKRVILADANLDKVLSAYNKHRDKPIREQAENIIHLFTLTNLGAPAAFKYFDTTIDRKRYTSTKEVLDATLIHQSITGLYETRIDLSQLGGD

SEQ ID NO: 272 - protein, 1540 aa, synthetic construct
  REGION 1..1540: note = 110.1 Cas9 TadAins 1250 polypeptide sequence
MDKKYSIGLAIGTNSVGWAVITDEYKVPSKKFKVLGNTDRHSIKKNLIGALLFDSGETAEATRLKRTARRRYTRRKNRICYLQEIFSNEMAKVDDSFFHRLEESFLVEEDKKHERHPIFGNIVDEVAYHEKYPTIYHLRKKLVDSTDKADLRLIYLALAHMIKFRGHFLIEGDLNPDNSDVDKLFIQLVQTYNQLFEENPINASGVDAKAILSARLSKSRRLENLIAQLPGEKKNGLFGNLIALSLGLTPNFKSNFDLAEDAKLQLSKDTYDDDLDNLLAQIGDQYADLFLAAKNLSDAILLSDILRVNTEITKAPLSASMIKRYDEHHQDLTLLKALVRQQLPEKYKEIFFDQSKNGYAGYIDGGASQEEFYKFIKPILEKMDGTEELLVKLNREDLLRKQRTFDNGSIPHQIHLGELHAILRRQEDFYPFLKDNREKIEKILTFRIPYYVGPLARGNSRFAWMTRKSEETITPWNFEEVVDKGASAQSFIERMTNFDKNLPNEKVLPKHSLLYEYFTVYNELTKVKYVTEGMRKPAFLSGEQKKAIVDLLFKTNRKVTVKQLKEDYFKKIECFDSVEISGVEDRFNASLGTYHDLLKIIKDKDFLDNEENEDILEDIVLTLTLFEDREMIEERLKTYAHLFDDKVMKQLKRRRYTGWGRLSRKLINGIRDKQSGKTILDFLKSDGFANRNFMQLIHDDSLTFKEDIQKAQVSGQGDSLHEHIANLAGSPAIKKGILQTVKVVDELVKVMGRHKPENIVIEMARENQTTQKGQKNSRERMKRIEEGIKELGSQILKEHPVENTQLQNEKLYLYYLQNGRDMYVDQELDINRLSDYDVDHIVPQSFLKDDSIDNKVLTRSDKNRGKSDNVPSEEVVKKMKNYWRQLLNAKLITQRKFDNLTKAERGGLSELDKAGFIKRQLVETRQITKHVAQILDSRMNTKYDENDKLIREVKVITLKSKLVSDFRKDFQFYKVREINNYHHAHDAYLNAVVGTALIKKYPKLESEFVYGDYKVYDVRKMIAKSEQEIGKATAKYFFYSNIMNFFKTEITLANGEIRKRPLIETNGETGEIVWDKGRDFATVRKVLSMPQVNIVKKTEVQTGGFSKESILPKRNSDKLIARKKDWDPKKYGGFDSPTVAYSVLVVAKVEKGKSKKLKSVKELLGITIMERSSFEKNPIDFLEAKGYKEVKKDLIIKLPKYSLFELENGRKRMLASAGELQKGNELALPSKYVNFLYLASHYEKLKGSPGSSGSETPGTSESATPESSGSEVEFSHEYWMRHALTLAKRARDEREVPVGAVLVLNNRVIGEGWNRAIGLHDPTAHAEIMALRQGGLVMQNYRLIDATLYVTFEPCVMCAGAMIHSRIGRVVFGVRNAKTGAAGSLMDVLHYPGMNHRVEITEGILADECAALLCYFFRMPREDNEQKQLFVEQHKHYLDEIIEQISEFSKRVILADANLDKVLSAYNKHRDKPIREQAENIIHLFTLTNLGAPAAFKYFDTTIDRKRYTSTKEVLDATLIHQSITGLYETRIDLSQLGGD

SEQ ID NO: 273 - protein, 1543 aa, synthetic construct
  REGION 1..1543: note = 110.2 Cas9 TadAins 1250 polypeptide sequence
MDKKYSIGLAIGTNSVGWAVITDEYKVPSKKFKVLGNTDRHSIKKNLIGALLFDSGETAEATRLKRTARRRYTRRKNRICYLQEIFSNEMAKVDDSFFHRLEESFLVEEDKKHERHPIFGNIVDEVAYHEKYPTIYHLRKKLVDSTDKADLRLIYLALAHMIKFRGHFLIEGDLNPDNSDVDKLFIQLVQTYNQLFEENPINASGVDAKAILSARLSKSRRLENLIAQLPGEKKNGLFGNLIALSLGLTPNFKSNFDLAEDAKLQLSKDTYDDDLDNLLAQIGDQYADLFLAAKNLSDAILLSDILRVNTEITKAPLSASMIKRYDEHHQDLTLLKALVRQQLPEKYKEIFFDQSKNGYAGYIDGGASQEEFYKFIKPILEKMDGTEELLVKLNREDLLRKQRTFDNGSIPHQIHLGELHAILRRQEDFYPFLKDNREKIEKILTFRIPYYVGPLARGNSRFAWMTRKSEETITPWNFEEVVDKGASAQSFIERMTNFDKNLPNEKVLPKHSLLYEYFTVYNELTKVKYVTEGMRKPAFLSGEQKKAIVDLLFKTNRKVTVKQLKEDYFKKIECFDSVEISGVEDRFNASLGTYHDLLKIIKDKDFLDNEENEDILEDIVLTLTLFEDREMIEERLKTYAHLFDDKVMKQLKRRRYTGWGRLSRKLINGIRDKQSGKTILDFLKSDGFANRNFMQLIHDDSLTFKEDIQKAQVSGQGDSLHEHIANLAGSPAIKKGILQTVKVVDELVKVMGRHKPENIVIEMARENQTTQKGQKNSRERMKRIEEGIKELGSQILKEHPVENTQLQNEKLYLYYLQNGRDMYVDQELDINRLSDYDVDHIVPQSFLKDDSIDNKVLTRSDKNRGKSDNVPSEEVVKKMKNYWRQLLNAKLITQRKFDNLTKAERGGLSELDKAGFIKRQLVETRQITKHVAQILDSRMNTKYDENDKLIREVKVITLKSKLVSDFRKDFQFYKVREINNYHHAHDAYLNAVVGTALIKKYPKLESEFVYGDYKVYDVRKMIAKSEQEIGKATAKYFFYSNIMNFFKTEITLANGEIRKRPLIETNGETGEIVWDKGRDFATVRKVLSMPQVNIVKKTEVQTGGFSKESILPKRNSDKLIARKKDWDPKKYGGFDSPTVAYSVLVVAKVEKGKSKKLKSVKELLGITIMERSSFEKNPIDFLEAKGYKEVKKDLIIKLPKYSLFELENGRKRMLASAGELQKGNELALPSKYVNFLYLASHYEKLKGSPGSSGSSGSETPGTSESATPESSGSEVEFSHEYWMRHALTLAKRARDEREVPVGAVLVLNNRVIGEGWNRAIGLHDPTAHAEIMALRQGGLVMQNYRLIDATLYVTFEPCVMCAGAMIHSRIGRVVFGVRNAKTGAAGSLMDVLHYPGMNHRVEITEGILADECAALLCYFFRMPREDNEQKQLFVEQHKHYLDEIIEQISEFSKRVILADANLDKVLSAYNKHRDKPIREQAENIIHLFTLTNLGAPAAFKYFDTTIDRKRYTSTKEVLDATLIHQSITGLYETRIDLSQLGGD

SEQ ID NO: 274 - protein, 1546 aa, synthetic construct
  REGION 1..1546: note = 110.3 Cas9 TadAins 1250 polypeptide sequence
MDKKYSIGLAIGTNSVGWAVITDEYKVPSKKFKVLGNTDRHSIKKNLIGALLFDSGETAEATRLKRTARRRYTRRKNRICYLQEIFSNEMAKVDDSFFHRLEESFLVEEDKKHERHPIFGNIVDEVAYHEKYPTIYHLRKKLVDSTDKADLRLIYLALAHMIKFRGHFLIEGDLNPDNSDVDKLFIQLVQTYNQLFEENPINASGVDAKAILSARLSKSRRLENLIAQLPGEKKNGLFGNLIALSLGLTPNFKSNFDLAEDAKLQLSKDTYDDDLDNLLAQIGDQYADLFLAAKNLSDAILLSDILRVNTEITKAPLSASMIKRYDEHHQDLTLLKALVRQQLPEKYKEIFFDQSKNGYAGYIDGGASQEEFYKFIKPILEKMDGTEELLVKLNREDLLRKQRTFDNGSIPHQIHLGELHAILRRQEDFYPFLKDNREKIEKILTFRIPYYVGPLARGNSRFAWMTRKSEETITPWNFEEVVDKGASAQSFIERMTNFDKNLPNEKVLPKHSLLYEYFTVYNELTKVKYVTEGMRKPAFLSGEQKKAIVDLLFKTNRKVTVKQLKEDYFKKIECFDSVEISGVEDRFNASLGTYHDLLKIIKDKDFLDNEENEDILEDIVLTLTLFEDREMIEERLKTYAHLFDDKVMKQLKRRRYTGWGRLSRKLINGIRDKQSGKTILDFLKSDGFANRNFMQLIHDDSLTFKEDIQKAQVSGQGDSLHEHIANLAGSPAIKKGILQTVKVVDELVKVMGRHKPENIVIEMARENQTTQKGQKNSRERMKRIEEGIKELGSQILKEHPVENTQLQNEKLYLYYLQNGRDMYVDQELDINRLSDYDVDHIVPQSFLKDDSIDNKVLTRSDKNRGKSDNVPSEEVVKKMKNYWRQLLNAKLITQRKFDNLTKAERGGLSELDKAGFIKRQLVETRQITKHVAQILDSRMNTKYDENDKLIREVKVITLKSKLVSDFRKDFQFYKVREINNYHHAHDAYLNAVVGTALIKKYPKLESEFVYGDYKVYDVRKMIAKSEQEIGKATAKYFFYSNIMNFFKTEITLANGEIRKRPLIETNGETGEIVWDKGRDFATVRKVLSMPQVNIVKKTEVQTGGFSKESILPKRNSDKLIARKKDWDPKKYGGFDSPTVAYSVLVVAKVEKGKSKKLKSVKELLGITIMERSSFEKNPIDFLEAKGYKEVKKDLIIKLPKYSLFELENGRKRMLASAGELQKGNELALPSKYVNFLYLASHYEKLKGSPGSSGSSGSETPGTSESATPESGSSSGSEVEFSHEYWMRHALTLAKRARDEREVPVGAVLVLNNRVIGEGWNRAIGLHDPTAHAEIMALRQGGLVMQNYRLIDATLYVTFEPCVMCAGAMIHSRIGRVVFGVRNAKTGAAGSLMDVLHYPGMNHRVEITEGILADECAALLCYFFRMPREDNEQKQLFVEQHKHYLDEIIEQISEFSKRVILADANLDKVLSAYNKHRDKPIREQAENIIHLFTLTNLGAPAAFKYFDTTIDRKRYTSTKEVLDATLIHQSITGLYETRIDLSQLGGD

SEQ ID NO: 275 - protein, 1546 aa, synthetic construct
  REGION 1..1546: note = 110.4 Cas9 TadAins 1250 polypeptide sequence
MDKKYSIGLAIGTNSVGWAVITDEYKVPSKKFKVLGNTDRHSIKKNLIGALLFDSGETAEATRLKRTARRRYTRRKNRICYLQEIFSNEMAKVDDSFFHRLEESFLVEEDKKHERHPIFGNIVDEVAYHEKYPTIYHLRKKLVDSTDKADLRLIYLALAHMIKFRGHFLIEGDLNPDNSDVDKLFIQLVQTYNQLFEENPINASGVDAKAILSARLSKSRRLENLIAQLPGEKKNGLFGNLIALSLGLTPNFKSNFDLAEDAKLQLSKDTYDDDLDNLLAQIGDQYADLFLAAKNLSDAILLSDILRVNTEITKAPLSASMIKRYDEHHQDLTLLKALVRQQLPEKYKEIFFDQSKNGYAGYIDGGASQEEFYKFIKPILEKMDGTEELLVKLNREDLLRKQRTFDNGSIPHQIHLGELHAILRRQEDFYPFLKDNREKIEKILTFRIPYYVGPLARGNSRFAWMTRKSEETITPWNFEEVVDKGASAQSFIERMTNFDKNLPNEKVLPKHSLLYEYFTVYNELTKVKYVTEGMRKPAFLSGEQKKAIVDLLFKTNRKVTVKQLKEDYFKKIECFDSVEISGVEDRFNASLGTYHDLLKIIKDKDFLDNEENEDILEDIVLTLTLFEDREMIEERLKTYAHLFDDKVMKQLKRRRYTGWGRLSRKLINGIRDKQSGKTILDFLKSDGFANRNFMQLIHDDSLTFKEDIQKAQVSGQGDSLHEHIANLAGSPAIKKGILQTVKVVDELVKVMGRHKPENIVIEMARENQTTQKGQKNSRERMKRIEEGIKELGSQILKEHPVENTQLQNEKLYLYYLQNGRDMYVDQELDINRLSDYDVDHIVPQSFLKDDSIDNKVLTRSDKNRGKSDNVPSEEVVKKMKNYWRQLLNAKLITQRKFDNLTKAERGGLSELDKAGFIKRQLVETRQITKHVAQILDSRMNTKYDENDKLIREVKVITLKSKLVSDFRKDFQFYKVREINNYHHAHDAYLNAVVGTALIKKYPKLESEFVYGDYKVYDVRKMIAKSEQEIGKATAKYFFYSNIMNFFKTEITLANGEIRKRPLIETNGETGEIVWDKGRDFATVRKVLSMPQVNIVKKTEVQTGGFSKESILPKRNSDKLIARKKDWDPKKYGGFDSPTVAYSVLVVAKVEKGKSKKLKSVKELLGITIMERSSFEKNPIDFLEAKGYKEVKKDLIIKLPKYSLFELENGRKRMLASAGELQKGNELALPSKYVNFLYLASHYEKLKGSPGSSGSSGSETPGTSESATPESGSSSGSEVEFSHEYWMRHALTLAKRARDEREVPVGAVLVLNNRVIGEGWNRAIGLHDPTAHAEIMALRQGGLVMQNYRLIDATLYVTFEPCVMCAGAMIHSRIGRVVFGVRNAKTGAAGSLMDVLHYPGMNHRVEITEGILADECAALLCYFFRMRREDNEQKQLFVEQHKHYLDEIIEQISEFSKRVILADANLDKVLSAYNKHRDKPIREQAENIIHLFTLTNLGAPAAFKYFDTTIDRKRYTSTKEVLDATLIHQSITGLYETRIDLSQLGGD

SEQ ID NO: 276 - protein, 1546 aa, synthetic construct
  REGION 1..1546: note = 110.5 Cas9 TadAins 1249 polypeptide sequence
MDKKYSIGLAIGTNSVGWAVITDEYKVPSKKFKVLGNTDRHSIKKNLIGALLFDSGETAEATRLKRTARRRYTRRKNRICYLQEIFSNEMAKVDDSFFHRLEESFLVEEDKKHERHPIFGNIVDEVAYHEKYPTIYHLRKKLVDSTDKADLRLIYLALAHMIKFRGHFLIEGDLNPDNSDVDKLFIQLVQTYNQLFEENPINASGVDAKAILSARLSKSRRLENLIAQLPGEKKNGLFGNLIALSLGLTPNFKSNFDLAEDAKLQLSKDTYDDDLDNLLAQIGDQYADLFLAAKNLSDAILLSDILRVNTEITKAPLSASMIKRYDEHHQDLTLLKALVRQQLPEKYKEIFFDQSKNGYAGYIDGGASQEEFYKFIKPILEKMDGTEELLVKLNREDLLRKQRTFDNGSIPHQIHLGELHAILRRQEDFYPFLKDNREKIEKILTFRIPYYVGPLARGNSRFAWMTRKSEETITPWNFEEVVDKGASAQSFIERMTNFDKNLPNEKVLPKHSLLYEYFTVYNELTKVKYVTEGMRKPAFLSGEQKKAIVDLLFKTNRKVTVKQLKEDYFKKIECFDSVEISGVEDRFNASLGTYHDLLKIIKDKDFLDNEENEDILEDIVLTLTLFEDREMIEERLKTYAHLFDDKVMKQLKRRRYTGWGRLSRKLINGIRDKQSGKTILDFLKSDGFANRNFMQLIHDDSLTFKEDIQKAQVSGQGDSLHEHIANLAGSPAIKKGILQTVKVVDELVKVMGRHKPENIVIEMARENQTTQKGQKNSRERMKRIEEGIKELGSQILKEHPVENTQLQNEKLYLYYLQNGRDMYVDQELDINRLSDYDVDHIVPQSFLKDDSIDNKVLTRSDKNRGKSDNVPSEEVVKKMKNYWRQLLNAKLITQRKFDNLTKAERGGLSELDKAGFIKRQLVETRQITKHVAQILDSRMNTKYDENDKLIREVKVITLKSKLVSDFRKDFQFYKVREINNYHHAHDAYLNAVVGTALIKKYPKLESEFVYGDYKVYDVRKMIAKSEQEIGKATAKYFFYSNIMNFFKTEITLANGEIRKRPLIETNGETGEIVWDKGRDFATVRKVLSMPQVNIVKKTEVQTGGFSKESILPKRNSDKLIARKKDWDPKKYGGFDSPTVAYSVLVVAKVEKGKSKKLKSVKELLGITIMERSSFEKNPIDFLEAKGYKEVKKDLIIKLPKYSLFELENGRKRMLASAGELQKGNELALPSKYVNFLYLASHYEKLKGSGSSGSSGSETPGTSESATPESGSSSGSEVEFSHEYWMRHALTLAKRARDEREVPVGAVLVLNNRVIGEGWNRAIGLHDPTAHAEIMALRQGGLVMQNYRLIDATLYVTFEPCVMCAGAMIHSRIGRVVFGVRNAKTGAAGSLMDVLHYPGMNHRVEITEGILADECAALLCYFFRMRRPEDNEQKQLFVEQHKHYLDEIIEQISEFSKRVILADANLDKVLSAYNKHRDKPIREQAENIIHLFTLTNLGAPAAFKYFDTTIDRKRYTSTKEVLDATLIHQSITGLYETRIDLSQLGGD

SEQ ID NO: 277 - protein, 1551 aa, synthetic construct
  REGION 1..1551: note = 110.5 Cas9 TadAins delta59-66 1250 polypeptide sequence
MDKKYSIGLAIGTNSVGWAVITDEYKVPSKKFKVLGNTDRHSIKKNLIGALLFDSGETAEATRLKRTARRRYTRRKNRICYLQEIFSNEMAKVDDSFFHRLEESFLVEEDKKHERHPIFGNIVDEVAYHEKYPTIYHLRKKLVDSTDKADLRLIYLALAHMIKFRGHFLIEGDLNPDNSDVDKLFIQLVQTYNQLFEENPINASGVDAKAILSARLSKSRRLENLIAQLPGEKKNGLFGNLIALSLGLTPNFKSNFDLAEDAKLQLSKDTYDDDLDNLLAQIGDQYADLFLAAKNLSDAILLSDILRVNTEITKAPLSASMIKRYDEHHQDLTLLKALVRQQLPEKYKEIFFDQSKNGYAGYIDGGASQEEFYKFIKPILEKMDGTEELLVKLNREDLLRKQRTFDNGSIPHQIHLGELHAILRRQEDFYPFLKDNREKIEKILTFRIPYYVGPLARGNSRFAWMTRKSEETITPWNFEEVVDKGASAQSFIERMTNFDKNLPNEKVLPKHSLLYEYFTVYNELTKVKYVTEGMRKPAFLSGEQKKAIVDLLFKTNRKVTVKQLKEDYFKKIECFDSVEISGVEDRFNASLGTYHDLLKIIKDKDFLDNEENEDILEDIVLTLTLFEDREMIEERLKTYAHLFDDKVMKQLKRRRYTGWGRLSRKLINGIRDKQSGKTILDFLKSDGFANRNFMQLIHDDSLTFKEDIQKAQVSGQGDSLHEHIANLAGSPAIKKGILQTVKVVDELVKVMGRHKPENIVIEMARENQTTQKGQKNSRERMKRIEEGIKELGSQILKEHPVENTQLQNEKLYLYYLQNGRDMYVDQELDINRLSDYDVDHIVPQSFLKDDSIDNKVLTRSDKNRGKSDNVPSEEVVKKMKNYWRQLLNAKLITQRKFDNLTKAERGGLSELDKAGFIKRQLVETRQITKHVAQILDSRMNTKYDENDKLIREVKVITLKSKLVSDFRKDFQFYKVREINNYHHAHDAYLNAVVGTALIKKYPKLESEFVYGDYKVYDVRKMIAKSEQEIGKATAKYFFYSNIMNFFKTEITLANGEIRKRPLIETNGETGEIVWDKGRDFATVRKVLSMPQVNIVKKTEVQTGGFSKESILPKRNSDKLIARKKDWDPKKYGGFDSPTVAYSVLVVAKVEKGKSKKLKSVKELLGITIMERSSFEKNPIDFLEAKGYKEVKKDLIIKLPKYSLFELENGRKRMLASAGELQKGNELALPSKYVNFLYLASHYEKLKGSPGSSGSSGSETPGTSESATPESGSSGSEVEFSHEYWMRHALTLAKRARDEREVPVGAVLVLNNRVIGEGWNRAHAEIMALRQGGLVMQNYRLIDATLYVTFEPCVMCAGAMIHSRIGRVVFGVRNAKTGAAGSLMDVLHYPGMNHRVEITEGILADECAALLCYFFRMPRQVFNAQKKAQSSTDEDNEQKQLFVEQHKHYLDEIIEQISEFSKRVILADANLDKVLSAYNKHRDKPIREQAENIIHLFTLTNLGAPAAFKYFDTTIDRKRYTSTKEVLDATLIHQSITGLYETRIDLSQLGGD

SEQ ID NO: 278 - protein, 1546 aa, synthetic construct
  REGION 1..1546: note = 110.6 Cas9 TadAins 1251 polypeptide sequence
MDKKYSIGLAIGTNSVGWAVITDEYKVPSKKFKVLGNTDRHSIKKNLIGALLFDSGETAEATRLKRTARRRYTRRKNRICYLQEIFSNEMAKVDDSFFHRLEESFLVEEDKKHERHPIFGNIVDEVAYHEKYPTIYHLRKKLVDSTDKADLRLIYLALAHMIKFRGHFLIEGDLNPDNSDVDKLFIQLVQTYNQLFEENPINASGVDAKAILSARLSKSRRLENLIAQLPGEKKNGLFGNLIALSLGLTPNFKSNFDLAEDAKLQLSKDTYDDDLDNLLAQIGDQYADLFLAAKNLSDAILLSDILRVNTEITKAPLSASMIKRYDEHHQDLTLLKALVRQQLPEKYKEIFFDQSKNGYAGYIDGGASQEEFYKFIKPILEKMDGTEELLVKLNREDLLRKQRTFDNGSIPHQIHLGELHAILRRQEDFYPFLKDNREKIEKILTFRIPYYVGPLARGNSRFAWMTRKSEETITPWNFEEVVDKGASAQSFIERMTNFDKNLPNEKVLPKHSLLYEYFTVYNELTKVKYVTEGMRKPAFLSGEQKKAIVDLLFKTNRKVTVKQLKEDYFKKIECFDSVEISGVEDRFNASLGTYHDLLKIIKDKDFLDNEENEDILEDIVLTLTLFEDREMIEERLKTYAHLFDDKVMKQLKRRRYTGWGRLSRKLINGIRDKQSGKTILDFLKSDGFANRNFMQLIHDDSLTFKEDIQKAQVSGQGDSLHEHIANLAGSPAIKKGILQTVKVVDELVKVMGRHKPENIVIEMARENQTTQKGQKNSRERMKRIEEGIKELGSQILKEHPVENTQLQNEKLYLYYLQNGRDMYVDQELDINRLSDYDVDHIVPQSFLKDDSIDNKVLTRSDKNRGKSDNVPSEEVVKKMKNYWRQLLNAKLITQRKFDNLTKAERGGLSELDKAGFIKRQLVETRQITKHVAQILDSRMNTKYDENDKLIREVKVITLKSKLVSDFRKDFQFYKVREINNYHHAHDAYLNAVVGTALIKKYPKLESEFVYGDYKVYDVRKMIAKSEQEIGKATAKYFFYSNIMNFFKTEITLANGEIRKRPLIETNGETGEIVWDKGRDFATVRKVLSMPQVNIVKKTEVQTGGFSKESILPKRNSDKLIARKKDWDPKKYGGFDSPTVAYSVLVVAKVEKGKSKKLKSVKELLGITIMERSSFEKNPIDFLEAKGYKEVKKDLIIKLPKYSLFELENGRKRMLASAGELQKGNELALPSKYVNFLYLASHYEKLKGSPEGSSGSSGSETPGTSESATPESGSSSGSEVEFSHEYWMRHALTLAKRARDEREVPVGAVLVLNNRVIGEGWNRAIGLHDPTAHAEIMALRQGGLVMQNYRLIDATLYVTFEPCVMCAGAMIHSRIGRVVFGVRNAKTGAAGSLMDVLHYPGMNHRVEITEGILADECAALLCYFFRMRRDNEQKQLFVEQHKHYLDEIIEQISEFSKRVILADANLDKVLSAYNKHRDKPIREQAENIIHLFTLTNLGAPAAFKYFDTTIDRKRYTSTKEVLDATLIHQSITGLYETRIDLSQLGGD

SEQ ID NO: 279 - protein, 1546 aa, synthetic construct
  REGION 1..1546: note = 110.7 Cas9 TadAins 1252 polypeptide sequence
MDKKYSIGLAIGTNSVGWAVITDEYKVPSKKFKVLGNTDRHSIKKNLIGALLFDSGETAEATRLKRTARRRYTRRKNRICYLQEIFSNEMAKVDDSFFHRLEESFLVEEDKKHERHPIFGNIVDEVAYHEKYPTIYHLRKKLVDSTDKADLRLIYLALAHMIKFRGHFLIEGDLNPDNSDVDKLFIQLVQTYNQLFEENPINASGVDAKAILSARLSKSRRLENLIAQLPGEKKNGLFGNLIALSLGLTPNFKSNFDLAEDAKLQLSKDTYDDDLDNLLAQIGDQYADLFLAAKNLSDAILLSDILRVNTEITKAPLSASMIKRYDEHHQDLTLLKALVRQQLPEKYKEIFFDQSKNGYAGYIDGGASQEEFYKFIKPILEKMDGTEELLVKLNREDLLRKQRTFDNGSIPHQIHLGELHAILRRQEDFYPFLKDNREKIEKILTFRIPYYVGPLARGNSRFAWMTRKSEETITPWNFEEVVDKGASAQSFIERMTNFDKNLPNEKVLPKHSLLYEYFTVYNELTKVKYVTEGMRKPAFLSGEQKKAIVDLLFKTNRKVTVKQLKEDYFKKIECFDSVEISGVEDRFNASLGTYHDLLKIIKDKDFLDNEENEDILEDIVLTLTLFEDREMIEERLKTYAHLFDDKVMKQLKRRRYTGWGRLSRKLINGIRDKQSGKTILDFLKSDGFANRNFMQLIHDDSLTFKEDIQKAQVSGQGDSLHEHIANLAGSPAIKKGILQTVKVVDELVKVMGRHKPENIVIEMARENQTTQKGQKNSRERMKRIEEGIKELGSQILKEHPVENTQLQNEKLYLYYLQNGRDMYVDQELDINRLSDYDVDHIVPQSFLKDDSIDNKVLTRSDKNRGKSDNVPSEEVVKKMKNYWRQLLNAKLITQRKFDNLTKAERGGLSELDKAGFIKRQLVETRQITKHVAQILDSRMNTKYDENDKLIREVKVITLKSKLVSDFRKDFQFYKVREINNYHHAHDAYLNAVVGTALIKKYPKLESEFVYGDYKVYDVRKMIAKSEQEIGKATAKYFFYSNIMNFFKTEITLANGEIRKRPLIETNGETGEIVWDKGRDFATVRKVLSMPQVNIVKKTEVQTGGFSKESILPKRNSDKLIARKKDWDPKKYGGFDSPTVAYSVLVVAKVEKGKSKKLKSVKELLGITIMERSSFEKNPIDFLEAKGYKEVKKDLIIKLPKYSLFELENGRKRMLASAGELQKGNELALPSKYVNFLYLASHYEKLKGSPEDGSSGSSGSETPGTSESATPESGSSSGSEVEFSHEYWMRHALTLAKRARDEREVPVGAVLVLNNRVIGEGWNRAIGLHDPTAHAEIMALRQGGLVMQNYRLIDATLYVTFEPCVMCAGAMIHSRIGRVVFGVRNAKTGAAGSLMDVLHYPGMNHRVEITEGILADECAALLCYFFRMRRNEQKQLFVEQHKHYLDEIIEQISEFSKRVILADANLDKVLSAYNKHRDKPIREQAENIIHLFTLTNLGAPAAFKYFDTTIDRKRYTSTKEVLDATLIHQSITGLYETRIDLSQLGGD

SEQ ID NO: 280 - protein, 1533 aa, synthetic construct
  REGION 1..1533: note = 110.8 Cas9 TadAins delta59-66 C-truncate 1250 polypeptide sequence
MDKKYSIGLAIGTNSVGWAVITDEYKVPSKKFKVLGNTDRHSIKKNLIGALLFDSGETAEATRLKRTARRRYTRRKNRICYLQEIFSNEMAKVDDSFFHRLEESFLVEEDKKHERHPIFGNIVDEVAYHEKYPTIYHLRKKLVDSTDKADLRLIYLALAHMIKFRGHFLIEGDLNPDNSDVDKLFIQLVQTYNQLFEENPINASGVDAKAILSARLSKSRRLENLIAQLPGEKKNGLFGNLIALSLGLTPNFKSNFDLAEDAKLQLSKDTYDDDLDNLLAQIGDQYADLFLAAKNLSDAILLSDILRVNTEITKAPLSASMIKRYDEHHQDLTLLKALVRQQLPEKYKEIFFDQSKNGYAGYIDGGASQEEFYKFIKPILEKMDGTEELLVKLNREDLLRKQRTFDNGSIPHQIHLGELHAILRRQEDFYPFLKDNREKIEKILTFRIPYYVGPLARGNSRFAWMTRKSEETITPWNFEEVVDKGASAQSFIERMTNFDKNLPNEKVLPKHSLLYEYFTVYNELTKVKYVTEGMRKPAFLSGEQKKAIVDLLFKTNRKVTVKQLKEDYFKKIECFDSVEISGVEDRFNASLGTYHDLLKIIKDKDFLDNEENEDILEDIVLTLTLFEDREMIEERLKTYAHLFDDKVMKQLKRRRYTGWGRLSRKLINGIRDKQSGKTILDFLKSDGFANRNFMQLIHDDSLTFKEDIQKAQVSGQGDSLHEHIANLAGSPAIKKGILQTVKVVDELVKVMGRHKPENIVIEMARENQTTQKGQKNSRERMKRIEEGIKELGSQILKEHPVENTQLQNEKLYLYYLQNGRDMYVDQELDINRLSDYDVDHIVPQSFLKDDSIDNKVLTRSDKNRGKSDNVPSEEVVKKMKNYWRQLLNAKLITQRKFDNLTKAERGGLSELDKAGFIKRQLVETRQITKHVAQILDSRMNTKYDENDKLIREVKVITLKSKLVSDFRKDFQFYKVREINNYHHAHDAYLNAVVGTALIKKYPKLESEFVYGDYKVYDVRKMIAKSEQEIGKATAKYFFYSNIMNFFKTEITLANGEIRKRPLIETNGETGEIVWDKGRDFATVRKVLSMPQVNIVKKTEVQTGGFSKESILPKRNSDKLIARKKDWDPKKYGGFDSPTVAYSVLVVAKVEKGKSKKLKSVKELLGITIMERSSFEKNPIDFLEAKGYKEVKKDLIIKLPKYSLFELENGRKRMLASAGELQKGNELALPSKYVNFLYLASHYEKLKGSPGSSGSETPGTSESATPESSGSEVEFSHEYWMRHALTLAKRARDEREVPVGAVLVLNNRVIGEGWNRAHAEIMALRQGGLVMQNYRLIDATLYVTFEPCVMCAGAMIHSRIGRVVFGVRNAKTGAAGSLMDVLHYPGMNHRVEITEGILADECAALLCYFFRMPRQEDNEQKQLFVEQHKHYLDEIIEQISEFSKRVILADANLDKVLSAYNKHRDKPIREQAENIIHLFTLTNLGAPAAFKYFDTTIDRKRYTSTKEVLDATLIHQSITGLYETRIDLSQLGGD

SEQ ID NO: 281 - protein, 1549 aa, synthetic construct
  REGION 1..1549: note = 111.1 Cas9 TadAins 997 polypeptide sequence
MDKKYSIGLAIGTNSVGWAVITDEYKVPSKKFKVLGNTDRHSIKKNLIGALLFDSGETAEATRLKRTARRRYTRRKNRICYLQEIFSNEMAKVDDSFFHRLEESFLVEEDKKHERHPIFGNIVDEVAYHEKYPTIYHLRKKLVDSTDKADLRLIYLALAHMIKFRGHFLIEGDLNPDNSDVDKLFIQLVQTYNQLFEENPINASGVDAKAILSARLSKSRRLENLIAQLPGEKKNGLFGNLIALSLGLTPNFKSNFDLAEDAKLQLSKDTYDDDLDNLLAQIGDQYADLFLAAKNLSDAILLSDILRVNTEITKAPLSASMIKRYDEHHQDLTLLKALVRQQLPEKYKEIFFDQSKNGYAGYIDGGASQEEFYKFIKPILEKMDGTEELLVKLNREDLLRKQRTFDNGSIPHQIHLGELHAILRRQEDFYPFLKDNREKIEKILTFRIPYYVGPLARGNSRFAWMTRKSEETITPWNFEEVVDKGASAQSFIERMTNFDKNLPNEKVLPKHSLLYEYFTVYNELTKVKYVTEGMRKPAFLSGEQKKAIVDLLFKTNRKVTVKQLKEDYFKKIECFDSVEISGVEDRFNASLGTYHDLLKIIKDKDFLDNEENEDILEDIVLTLTLFEDREMIEERLKTYAHLFDDKVMKQLKRRRYTGWGRLSRKLINGIRDKQSGKTILDFLKSDGFANRNFMQLIHDDSLTFKEDIQKAQVSGQGDSLHEHIANLAGSPAIKKGILQTVKVVDELVKVMGRHKPENIVIEMARENQTTQKGQKNSRERMKRIEEGIKELGSQILKEHPVENTQLQNEKLYLYYLQNGRDMYVDQELDINRLSDYDVDHIVPQSFLKDDSIDNKVLTRSDKNRGKSDNVPSEEVVKKMKNYWRQLLNAKLITQRKFDNLTKAERGGLSELDKAGFIKRQLVETRQITKHVAQILDSRMNTKYDENDKLIREVKVITLKSKLVSDFRKDFQFYKVREINNYHHAHDAYLNAVVGTALSHEYWMRHALTLAKRARDEREVPVGAVLVLNNRVIGEGWNRAIGLHDPTAHAEIMALRQGGLVMQNYRLIDATLYVTFEPCVMCAGAMIHSRIGRVVFGVRNAKTGAAGSLMDVLHYPGMNHRVEITEGILADECAALLCYFFRMPRQVFNAQKKAQSSTDGSSGSETPGTSESATPESSGIKKYPKLESEFVYGDYKVYDVRKMIAKSEQEIGKATAKYFFYSNIMNFFKTEITLANGEIRKRPLIETNGETGEIVWDKGRDFATVRKVLSMPQVNIVKKTEVQTGGFSKESILPKRNSDKLIARKKDWDPKKYGGFDSPTVAYSVLVVAKVEKGKSKKLKSVKELLGITIMERSSFEKNPIDFLEAKGYKEVKKDLIIKLPKYSLFELENGRKRMLASAGELQKGNELALPSKYVNFLYLASHYEKLKGSPEDNEQKQLFVEQHKHYLDEIIEQISEFSKRVILADANLDKVLSAYNKHRDKPIREQAENIIHLFTLTNLGAPAAFKYFDTTIDRKRYTSTKEVLDATLIHQSITGLYETRIDLSQLGGD

SEQ ID NO: 282 - protein, 1555 aa, synthetic construct
  REGION 1..1555: note = 111.2 Cas9 TadAins 997 polypeptide sequence
MDKKYSIGLAIGTNSVGWAVITDEYKVPSKKFKVLGNTDRHSIKKNLIGALLFDSGETAEATRLKRTARRRYTRRKNRICYLQEIFSNEMAKVDDSFFHRLEESFLVEEDKKHERHPIFGNIVDEVAYHEKYPTIYHLRKKLVDSTDKADLRLIYLALAHMIKFRGHFLIEGDLNPDNSDVDKLFIQLVQTYNQLFEENPINASGVDAKAILSARLSKSRRLENLIAQLPGEKKNGLFGNLIALSLGLTPNFKSNFDLAEDAKLQLSKDTYDDDLDNLLAQIGDQYADLFLAAKNLSDAILLSDILRVNTEITKAPLSASMIKRYDEHHQDLTLLKALVRQQLPEKYKEIFFDQSKNGYAGYIDGGASQEEFYKFIKPILEKMDGTEELLVKLNREDLLRKQRTFDNGSIPHQIHLGELHAILRRQEDFYPFLKDNREKIEKILTFRIPYYVGPLARGNSRFAWMTRKSEETITPWNFEEVVDKGASAQSFIERMTNFDKNLPNEKVLPKHSLLYEYFTVYNELTKVKYVTEGMRKPAFLSGEQKKAIVDLLFKTNRKVTVKQLKEDYFKKIECFDSVEISGVEDRFNASLGTYHDLLKIIKDKDFLDNEENEDILEDIVLTLTLFEDREMIEERLKTYAHLFDDKVMKQLKRRRYTGWGRLSRKLINGIRDKQSGKTILDFLKSDGFANRNFMQLIHDDSLTFKEDIQKAQVSGQGDSLHEHIANLAGSPAIKKGILQTVKVVDELVKVMGRHKPENIVIEMARENQTTQKGQKNSRERMKRIEEGIKELGSQILKEHPVENTQLQNEKLYLYYLQNGRDMYVDQELDINRLSDYDVDHIVPQSFLKDDSIDNKVLTRSDKNRGKSDNVPSEEVVKKMKNYWRQLLNAKLITQRKFDNLTKAERGGLSELDKAGFIKRQLVETRQITKHVAQILDSRMNTKYDENDKLIREVKVITLKSKLVSDFRKDFQFYKVREINNYHHAHDAYLNAVVGTALSHEYWMRHALTLAKRARDEREVPVGAVLVLNNRVIGEGWNRAIGLHDPTAHAEIMALRQGGLVMQNYRLIDATLYVTFEPCVMCAGAMIHSRIGRVVFGVRNAKTGAAGSLMDVLHYPGMNHRVEITEGILADECAALLCYFFRMPRQVFNAQKKAQSSTDGSSGSSGSETPGTSESATPESSGGSSIKKYPKLESEFVYGDYKVYDVRKMIAKSEQEIGKATAKYFFYSNIMNFFKTEITLANGEIRKRPLIETNGETGEIVWDKGRDFATVRKVLSMPQVNIVKKTEVQTGGFSKESILPKRNSDKLIARKKDWDPKKYGGFDSPTVAYSVLVVAKVEKGKSKKLKSVKELLGITIMERSSFEKNPIDFLEAKGYKEVKKDLIIKLPKYSLFELENGRKRMLASAGELQKGNELALPSKYVNFLYLASHYEKLKGSPEDNEQKQLFVEQHKHYLDEIIEQISEFSKRVILADANLDKVLSAYNKHRDKPIREQAENIIHLFTLTNLGAPAAFKYFDTTIDRKRYTSTKEVLDATLIHQSITGLYETRIDLSQLGGD

SEQ ID NO: 283 - protein, 1421 aa, synthetic construct
  REGION 1..1421: note = 112 delta HNH TadA polypeptide sequence
MDKKYSIGLAIGTNSVGWAVITDEYKVPSKKFKVLGNTDRHSIKKNLIGALLFDSGETAEATRLKRTARRRYTRRKNRICYLQEIFSNEMAKVDDSFFHRLEESFLVEEDKKHERHPIFGNIVDEVAYHEKYPTIYHLRKKLVDSTDKADLRLIYLALAHMIKFRGHFLIEGDLNPDNSDVDKLFIQLVQTYNQLFEENPINASGVDAKAILSARLSKSRRLENLIAQLPGEKKNGLFGNLIALSLGLTPNFKSNFDLAEDAKLQLSKDTYDDDLDNLLAQIGDQYADLFLAAKNLSDAILLSDILRVNTEITKAPLSASMIKRYDEHHQDLTLLKALVRQQLPEKYKEIFFDQSKNGYAGYIDGGASQEEFYKFIKPILEKMDGTEELLVKLNREDLLRKQRTFDNGSIPHQIHLGELHAILRRQEDFYPFLKDNREKIEKILTFRIPYYVGPLARGNSRFAWMTRKSEETITPWNFEEVVDKGASAQSFIERMTNFDKNLPNEKVLPKHSLLYEYFTVYNELTKVKYVTEGMRKPAFLSGEQKKAIVDLLFKTNRKVTVKQLKEDYFKKIECFDSVEISGVEDRFNASLGTYHDLLKIIKDKDFLDNEENEDILEDIVLTLTLFEDREMIEERLKTYAHLFDDKVMKQLKRRRYTGWGRLSRKLINGIRDKQSGKTILDFLKSDGFANRNFMQLIHDDSLTFKEDIQKAQVSGQGDSLHEHIANLAGSPAIKKGILQTVKVVDELVKVMGRHKPENIVIEMARENQTTQKGQKNSRERMKRIEEGIKELGSEVEFSHEYWMRHALTLAKRARDEREVPVGAVLVLNNRVIGEGWNRAIGLHDPTAHAEIMALRQGGLVMQNYRLIDATLYVTFEPCVMCAGAMIHSRIGRVVFGVRNAKTGAAGSLMDVLHYPGMNHRVEITEGILADECAALLCYFFRMPRQVFNAQKKAQSSTDGGLSELDKAGFIKRQLVETRQITKHVAQILDSRMNTKYDENDKLIREVKVITLKSKLVSDFRKDFQFYKVREINNYHHAHDAYLNAVVGTALIKKYPKLESEFVYGDYKVYDVRKMIAKSEQEIGKATAKYFFYSNIMNFFKTEITLANGEIRKRPLIETNGETGEIVWDKGRDFATVRKVLSMPQVNIVKKTEVQTGGFSKESILPKRNSDKLIARKKDWDPKKYGGFDSPTVAYSVLVVAKVEKGKSKKLKSVKELLGITIMERSSFEKNPIDFLEAKGYKEVKKDLIIKLPKYSLFELENGRKRMLASAGELQKGNELALPSKYVNFLYLASHYEKLKGSPEDNEQKQLFVEQHKHYLDEIIEQISEFSKRVILADANLDKVLSAYNKHRDKPIREQAENIIHLFTLTNLGAPAAFKYFDTTIDRKRYTSTKEVLDATLIHQSITGLYETRIDLSQLGGD

SEQ ID NO: 284 - protein, 1552 aa, synthetic construct
  REGION 1..1552: note = 113 N-term single TadA helixtrunc 165-end polypeptide sequence
MSEVEFSHEYWMRHALTLAKRARDEREVPVGAVLVLNNRVIGEGWNRAIGLHDPTAHAEIMALRQGGLVMQNYRLIDATLYVTFEPCVMCAGAMIHSRIGRVVFGVRNAKTGAAGSLMDVLHYPGMNHRVEITEGILADECAALLCYFFRMPRSGGSSGGSSGSETPGTSESATPESSGGSSGGSDKKYSIGLAIGTNSVGWAVITDEYKVPSKKFKVLGNTDRHSIKKNLIGALLFDSGETAEATRLKRTARRRYTRRKNRICYLQEIFSNEMAKVDDSFFHRLEESFLVEEDKKHERHPIFGNIVDEVAYHEKYPTIYHLRKKLVDSTDKADLRLIYLALAHMIKFRGHFLIEGDLNPDNSDVDKLFIQLVQTYNQLFEENPINASGVDAKAILSARLSKSRRLENLIAQLPGEKKNGLFGNLIALSLGLTPNFKSNFDLAEDAKLQLSKDTYDDDLDNLLAQIGDQYADLFLAAKNLSDAILLSDILRVNTEITKAPLSASMIKRYDEHHQDLTLLKALVRQQLPEKYKEIFFDQSKNGYAGYIDGGASQEEFYKFIKPILEKMDGTEELLVKLNREDLLRKQRTFDNGSIPHQIHLGELHAILRRQEDFYPFLKDNREKIEKILTFRIPYYVGPLARGNSRFAWMTRKSEETITPWNFEEVVDKGASAQSFIERMTNFDKNLPNEKVLPKHSLLYEYFTVYNELTKVKYVTEGMRKPAFLSGEQKKAIVDLLFKTNRKVTVKQLKEDYFKKIECFDSVEISGVEDRFNASLGTYHDLLKIIKDKDFLDNEENEDILEDIVLTLTLFEDREMIEERLKTYAHLFDDKVMKQLKRRRYTGWGRLSRKLINGIRDKQSGKTILDFLKSDGFANRNFMQLIHDDSLTFKEDIQKAQVSGQGDSLHEHIANLAGSPAIKKGILQTVKVVDELVKVMGRHKPENIVIEMARENQTTQKGQKNSRERMKRIEEGIKELGSQILKEHPVENTQLQNEKLYLYYLQNGRDMYVDQELDINRLSDYDVDHIVPQSFLKDDSIDNKVLTRSDKNRGKSDNVPSEEVVKKMKNYWRQLLNAKLITQRKFDNLTKAERGGLSELDKAGFIKRQLVETRQITKHVAQILDSRMNTKYDENDKLIREVKVITLKSKLVSDFRKDFQFYKVREINNYHHAHDAYLNAVVGTALIKKYPKLESEFVYGDYKVYDVRKMIAKSEQEIGKATAKYFFYSNIMNFFKTEITLANGEIRKRPLIETNGETGEIVWDKGRDFATVRKVLSMPQVNIVKKTEVQTGGFSKESILPKRNSDKLIARKKDWDPKKYGGFDSPTVAYSVLVVAKVEKGKSKKLKSVKELLGITIMERSSFEKNPIDFLEAKGYKEVKKDLIIKLPKYSLFELENGRKRMLASAGELQKGNELALPSKYVNFLYLASHYEKLKGSPEDNEQKQLFVEQHKHYLDEIIEQISEFSKRVILADANLDKVLSAYNKHRDKPIREQAENIIHLFTLTNLGAPAAFKYFDTTIDRKRYTSTKEVLDATLIHQSITGLYETRIDLSQLGGD

SEQ ID NO: 285 - protein, 1545 aa, synthetic construct
  REGION 1..1545: note = 114 N-term single TadA helixtrunc 165-end delta 59-65 polypeptide sequence
MSEVEFSHEYWMRHALTLAKRARDEREVPVGAVLVLNNRVIGEGWNRTAHAEIMALRQGGLVMQNYRLIDATLYVTFEPCVMCAGAMIHSRIGRVVFGVRNAKTGAAGSLMDVLHYPGMNHRVEITEGILADECAALLCYFFRMPRSGGSSGGSSGSETPGTSESATPESSGGSSGGSDKKYSIGLAIGTNSVGWAVITDEYKVPSKKFKVLGNTDRHSIKKNLIGALLFDSGETAEATRLKRTARRRYTRRKNRICYLQEIFSNEMAKVDDSFFHRLEESFLVEEDKKHERHPIFGNIVDEVAYHEKYPTIYHLRKKLVDSTDKADLRLIYLALAHMIKFRGHFLIEGDLNPDNSDVDKLFIQLVQTYNQLFEENPINASGVDAKAILSARLSKSRRLENLIAQLPGEKKNGLFGNLIALSLGLTPNFKSNFDLAEDAKLQLSKDTYDDDLDNLLAQIGDQYADLFLAAKNLSDAILLSDILRVNTEITKAPLSASMIKRYDEHHQDLTLLKALVRQQLPEKYKEIFFDQSKNGYAGYIDGGASQEEFYKFIKPILEKMDGTEELLVKLNREDLLRKQRTFDNGSIPHQIHLGELHAILRRQEDFYPFLKDNREKIEKILTFRIPYYVGPLARGNSRFAWMTRKSEETITPWNFEEVVDKGASAQSFIERMTNFDKNLPNEKVLPKHSLLYEYFTVYNELTKVKYVTEGMRKPAFLSGEQKKAIVDLLFKTNRKVTVKQLKEDYFKKIECFDSVEISGVEDRFNASLGTYHDLLKIIKDKDFLDNEENEDILEDIVLTLTLFEDREMIEERLKTYAHLFDDKVMKQLKRRRYTGWGRLSRKLINGIRDKQSGKTILDFLKSDGFANRNFMQLIHDDSLTFKEDIQKAQVSGQGDSLHEHIANLAGSPAIKKGILQTVKVVDELVKVMGRHKPENIVIEMARENQTTQKGQKNSRERMKRIEEGIKELGSQILKEHPVENTQLQNEKLYLYYLQNGRDMYVDQELDINRLSDYDVDHIVPQSFLKDDSIDNKVLTRSDKNRGKSDNVPSEEVVKKMKNYWRQLLNAKLITQRKFDNLTKAERGGLSELDKAGFIKRQLVETRQITKHVAQILDSRMNTKYDENDKLIREVKVITLKSKLVSDFRKDFQFYKVREINNYHHAHDAYLNAVVGTALIKKYPKLESEFVYGDYKVYDVRKMIAKSEQEIGKATAKYFFYSNIMNFFKTEITLANGEIRKRPLIETNGETGEIVWDKGRDFATVRKVLSMPQVNIVKKTEVQTGGFSKESILPKRNSDKLIARKKDWDPKKYGGFDSPTVAYSVLVVAKVEKGKSKKLKSVKELLGITIMERSSFEKNPIDFLEAKGYKEVKKDLIIKLPKYSLFELENGRKRMLASAGELQKGNELALPSKYVNFLYLASHYEKLKGSPEDNEQKQLFVEQHKHYLDEIIEQISEFSKRVILADANLDKVLSAYNKHRDKPIREQAENIIHLFTLTNLGAPAAFKYFDTTIDRKRYTSTKEVLDATLIHQSITGLYETRIDLSQLGGD

SEQ ID NO: 286 - protein, 1541 aa, synthetic construct
  REGION 1..1541: note = 115.1 Cas9 TadAins 1004 polypeptide sequence
MDKKYSIGLAIGTNSVGWAVITDEYKVPSKKFKVLGNTDRHSIKKNLIGALLFDSGETAEATRLKRTARRRYTRRKNRICYLQEIFSNEMAKVDDSFFHRLEESFLVEEDKKHERHPIFGNIVDEVAYHEKYPTIYHLRKKLVDSTDKADLRLIYLALAHMIKFRGHFLIEGDLNPDNSDVDKLFIQLVQTYNQLFEENPINASGVDAKAILSARLSKSRRLENLIAQLPGEKKNGLFGNLIALSLGLTPNFKSNFDLAEDAKLQLSKDTYDDDLDNLLAQIGDQYADLFLAAKNLSDAILLSDILRVNTEITKAPLSASMIKRYDEHHQDLTLLKALVRQQLPEKYKEIFFDQSKNGYAGYIDGGASQEEFYKFIKPILEKMDGTEELLVKLNREDLLRKQRTFDNGSIPHQIHLGELHAILRRQEDFYPFLKDNREKIEKILTFRIPYYVGPLARGNSRFAWMTRKSEETITPWNFEEVVDKGASAQSFIERMTNFDKNLPNEKVLPKHSLLYEYFTVYNELTKVKYVTEGMRKPAFLSGEQKKAIVDLLFKTNRKVTVKQLKEDYFKKIECFDSVEISGVEDRFNASLGTYHDLLKIIKDKDFLDNEENEDILEDIVLTLTLFEDREMIEERLKTYAHLFDDKVMKQLKRRRYTGWGRLSRKLINGIRDKQSGKTILDFLKSDGFANRNFMQLIHDDSLTFKEDIQKAQVSGQGDSLHEHIANLAGSPAIKKGILQTVKVVDELVKVMGRHKPENIVIEMARENQTTQKGQKNSRERMKRIEEGIKELGSQILKEHPVENTQLQNEKLYLYYLQNGRDMYVDQELDINRLSDYDVDHIVPQSFLKDDSIDNKVLTRSDKNRGKSDNVPSEEVVKKMKNYWRQLLNAKLITQRKFDNLTKAERGGLSELDKAGFIKRQLVETRQITKHVAQILDSRMNTKYDENDKLIREVKVITLKSKLVSDFRKDFQFYKVREINNYHHAHDAYLNAVVGTALIKKYPKGSSGSETPGTSESATPESSGSEVEFSHEYWMRHALTLAKRARDEREVPVGAVLVLNNRVIGEGWNRAIGLHDPTAHAEIMALRQGGLVMQNYRLIDATLYVTFEPCVMCAGAMIHSRIGRVVFGVRNAKTGAAGSLMDVLHYPGMNHRVEITEGILADECAALLCYFFRMPRQLESEFVYGDYKVYDVRKMIAKSEQEIGKATAKYFFYSNIMNFFKTEITLANGEIRKRPLIETNGETGEIVWDKGRDFATVRKVLSMPQVNIVKKTEVQTGGFSKESILPKRNSDKLIARKKDWDPKKYGGFDSPTVAYSVLVVAKVEKGKSKKLKSVKELLGITIMERSSFEKNPIDFLEAKGYKEVKKDLIIKLPKYSLFELENGRKRMLASAGELQKGNELALPSKYVNFLYLASHYEKLKGSPEDNEQKQLFVEQHKHYLDEIIEQISEFSKRVILADANLDKVLSAYNKHRDKPIREQAENIIHLFTLTNLGAPAAFKYFDTTIDRKRYTSTKEVLDATLIHQSITGLYETRIDLSQLGGD

SEQ ID NO: 287 - protein, 1541 aa, synthetic construct
  REGION 1..1541: note = 115.2 Cas9 TadAins 1005 polypeptide sequence
MDKKYSIGLAIGTNSVGWAVITDEYKVPSKKFKVLGNTDRHSIKKNLIGALLFDSGETAEATRLKRTARRRYTRRKNRICYLQEIFSNEMAKVDDSFFHRLEESFLVEEDKKHERHPIFGNIVDEVAYHEKYPTIYHLRKKLVDSTDKADLRLIYLALAHMIKFRGHFLIEGDLNPDNSDVDKLFIQLVQTYNQLFEENPINASGVDAKAILSARLSKSRRLENLIAQLPGEKKNGLFGNLIALSLGLTPNFKSNFDLAEDAKLQLSKDTYDDDLDNLLAQIGDQYADLFLAAKNLSDAILLSDILRVNTEITKAPLSASMIKRYDEHHQDLTLLKALVRQQLPEKYKEIFFDQSKNGYAGYIDGGASQEEFYKFIKPILEKMDGTEELLVKLNREDLLRKQRTFDNGSIPHQIHLGELHAILRRQEDFYPFLKDNREKIEKILTFRIPYYVGPLARGNSRFAWMTRKSEETITPWNFEEVVDKGASAQSFIERMTNFDKNLPNEKVLPKHSLLYEYFTVYNELTKVKYVTEGMRKPAFLSGEQKKAIVDLLFKTNRKVTVKQLKEDYFKKIECFDSVEISGVEDRFNASLGTYHDLLKIIKDKDFLDNEENEDILEDIVLTLTLFEDREMIEERLKTYAHLFDDKVMKQLKRRRYTGWGRLSRKLINGIRDKQSGKTILDFLKSDGFANRNFMQLIHDDSLTFKEDIQKAQVSGQGDSLHEHIANLAGSPAIKKGILQTVKVVDELVKVMGRHKPENIVIEMARENQTTQKGQKNSRERMKRIEEGIKELGSQILKEHPVENTQLQNEKLYLYYLQNGRDMYVDQELDINRLSDYDVDHIVPQSFLKDDSIDNKVLTRSDKNRGKSDNVPSEEVVKKMKNYWRQLLNAKLITQRKFDNLTKAERGGLSELDKAGFIKRQLVETRQITKHVAQILDSRMNTKYDENDKLIREVKVITLKSKLVSDFRKDFQFYKVREINNYHHAHDAYLNAVVGTALIKKYPKLGSSGSETPGTSESATPESSGSEVEFSHEYWMRHALTLAKRARDEREVPVGAVLVLNNRVIGEGWNRAIGLHDPTAHAEIMALRQGGLVMQNYRLIDATLYVTFEPCVMCAGAMIHSRIGRVVFGVRNAKTGAAGSLMDVLHYPGMNHRVEITEGILADECAALLCYFFRMPRQESEFVYGDYKVYDVRKMIAKSEQEIGKATAKYFFYSNIMNFFKTEITLANGEIRKRPLIETNGETGEIVWDKGRDFATVRKVLSMPQVNIVKKTEVQTGGFSKESILPKRNSDKLIARKKDWDPKKYGGFDSPTVAYSVLVVAKVEKGKSKKLKSVKELLGITIMERSSFEKNPIDFLEAKGYKEVKKDLIIKLPKYSLFELENGRKRMLASAGELQKGNELALPSKYVNFLYLASHYEKLKGSPEDNEQKQLFVEQHKHYLDEIIEQISEFSKRVILADANLDKVLSAYNKHRDKPIREQAENIIHLFTLTNLGAPAAFKYFDTTIDRKRYTSTKEVLDATLIHQSITGLYETRIDLSQLGGD

SEQ ID NO: 288 - protein, 1541 aa, synthetic construct
  REGION 1..1541: note = 115.3 Cas9 TadAins 1006 polypeptide sequence
MDKKYSIGLAIGTNSVGWAVITDEYKVPSKKFKVLGNTDRHSIKKNLIGALLFDSGETAEATRLKRTARRRYTRRKNRICYLQEIFSNEMAKVDDSFFHRLEESFLVEEDKKHERHPIFGNIVDEVAYHEKYPTIYHLRKKLVDSTDKADLRLIYLALAHMIKFRGHFLIEGDLNPDNSDVDKLFIQLVQTYNQLFEENPINASGVDAKAILSARLSKSRRLENLIAQLPGEKKNGLFGNLIALSLGLTPNFKSNFDLAEDAKLQLSKDTYDDDLDNLLAQIGDQYADLFLAAKNLSDAILLSDILRVNTEITKAPLSASMIKRYDEHHQDLTLLKALVRQQLPEKYKEIFFDQSKNGYAGYIDGGASQEEFYKFIKPILEKMDGTEELLVKLNREDLLRKQRTFDNGSIPHQIHLGELHAILRRQEDFYPFLKDNREKIEKILTFRIPYYVGPLARGNSRFAWMTRKSEETITPWNFEEVVDKGASAQSFIERMTNFDKNLPNEKVLPKHSLLYEYFTVYNELTKVKYVTEGMRKPAFLSGEQKKAIVDLLFKTNRKVTVKQLKEDYFKKIECFDSVEISGVEDRFNASLGTYHDLLKIIKDKDFLDNEENEDILEDIVLTLTLFEDREMIEERLKTYAHLFDDKVMKQLKRRRYTGWGRLSRKLINGIRDKQSGKTILDFLKSDGFANRNFMQLIHDDSLTFKEDIQKAQVSGQGDSLHEHIANLAGSPAIKKGILQTVKVVDELVKVMGRHKPENIVIEMARENQTTQKGQKNSRERMKRIEEGIKELGSQILKEHPVENTQLQNEKLYLYYLQNGRDMYVDQELDINRLSDYDVDHIVPQSFLKDDSIDNKVLTRSDKNRGKSDNVPSEEVVKKMKNYWRQLLNAKLITQRKFDNLTKAERGGLSELDKAGFIKRQLVETRQITKHVAQILDSRMNTKYDENDKLIREVKVITLKSKLVSDFRKDFQFYKVREINNYHHAHDAYLNAVVGTALIKKYPKLEGSSGSETPGTSESATPESSGSEVEFSHEYWMRHALTLAKRARDEREVPVGAVLVLNNRVIGEGWNRAIGLHDPTAHAEIMALRQGGLVMQNYRLIDATLYVTFEPCVMCAGAMIHSRIGRVVFGVRNAKTGAAGSLMDVLHYPGMNHRVEITEGILADECAALLCYFFRMPRQSEFVYGDYKVYDVRKMIAKSEQEIGKATAKYFFYSNIMNFFKTEITLANGEIRKRPLIETNGETGEIVWDKGRDFATVRKVLSMPQVNIVKKTEVQTGGFSKESILPKRNSDKLIARKKDWDPKKYGGFDSPTVAYSVLVVAKVEKGKSKKLKSVKELLGITIMERSSFEKNPIDFLEAKGYKEVKKDLIIKLPKYSLFELENGRKRMLASAGELQKGNELALPSKYVNFLYLASHYEKLKGSPEDNEQKQLFVEQHKHYLDEIIEQISEFSKRVILADANLDKVLSAYNKHRDKPIREQAENIIHLFTLTNLGAPAAFKYFDTTIDRKRYTSTKEVLDATLIHQSITGLYETRIDLSQLGGD

SEQ ID NO: 289 - protein, 1541 aa, synthetic construct
  REGION 1..1541: note = 115.4 Cas9 TadAins 1007 polypeptide sequence
MDKKYSIGLAIGTNSVGWAVITDEYKVPSKKFKVLGNTDRHSIKKNLIGALLFDSGETAEATRLKRTARRRYTRRKNRICYLQEIFSNEMAKVDDSFFHRLEESFLVEEDKKHERHPIFGNIVDEVAYHEKYPTIYHLRKKLVDSTDKADLRLIYLALAHMIKFRGHFLIEGDLNPDNSDVDKLFIQLVQTYNQLFEENPINASGVDAKAILSARLSKSRRLENLIAQLPGEKKNGLFGNLIALSLGLTPNFKSNFDLAEDAKLQLSKDTYDDDLDNLLAQIGDQYADLFLAAKNLSDAILLSDILRVNTEITKAPLSASMIKRYDEHHQDLTLLKALVRQQLPEKYKEIFFDQSKNGYAGYIDGGASQEEFYKFIKPILEKMDGTEELLVKLNREDLLRKQRTFDNGSIPHQIHLGELHAILRRQEDFYPFLKDNREKIEKILTFRIPYYVGPLARGNSRFAWMTRKSEETITPWNFEEVVDKGASAQSFIERMTNFDKNLPNEKVLPKHSLLYEYFTVYNELTKVKYVTEGMRKPAFLSGEQKKAIVDLLFKTNRKVTVKQLKEDYFKKIECFDSVEISGVEDRFNASLGTYHDLLKIIKDKDFLDNEENEDILEDIVLTLTLFEDREMIEERLKTYAHLFDDKVMKQLKRRRYTGWGRLSRKLINGIRDKQSGKTILDFLKSDGFANRNFMQLIHDDSLTFKEDIQKAQVSGQGDSLHEHIANLAGSPAIKKGILQTVKVVDELVKVMGRHKPENIVIEMARENQTTQKGQKNSRERMKRIEEGIKELGSQILKEHPVENTQLQNEKLYLYYLQNGRDMYVDQELDINRLSDYDVDHIVPQSFLKDDSIDNKVLTRSDKNRGKSDNVPSEEVVKKMKNYWRQLLNAKLITQRKFDNLTKAERGGLSELDKAGFIKRQLVETRQITKHVAQILDSRMNTKYDENDKLIREVKVITLKSKLVSDFRKDFQFYKVREINNYHHAHDAYLNAVVGTALIKKYPKLESGSSGSETPGTSESATPESSGSEVEFSHEYWMRHALTLAKRARDEREVPVGAVLVLNNRVIGEGWNRAIGLHDPTAHAEIMALRQGGLVMQNYRLIDATLYVTFEPCVMCAGAMIHSRIGRVVFGVRNAKTGAAGSLMDVLHYPGMNHRVEITEGILADECAALLCYFFRMPRQEFVYGDYKVYDVRKMIAKSEQEIGKATAKYFFYSNIMNFFKTEITLANGEIRKRPLIETNGETGEIVWDKGRDFATVRKVLSMPQVNIVKKTEVQTGGFSKESILPKRNSDKLIARKKDWDPKKYGGFDSPTVAYSVLVVAKVEKGKSKKLKSVKELLGITIMERSSFEKNPIDFLEAKGYKEVKKDLIIKLPKYSLFELENGRKRMLASAGELQKGNELALPSKYVNFLYLASHYEKLKGSPEDNEQKQLFVEQHKHYLDEIIEQISEFSKRVILADANLDKVLSAYNKHRDKPIREQAENIIHLFTLTNLGAPAAFKYFDTTIDRKRYTSTKEVLDATLIHQSITGLYETRIDLSQLGGD

SEQ ID NO: 290 - protein, 1541 aa, synthetic construct
  REGION 1..1541: note = 116.1 Cas9 TadAins C-term truncate 792 polypeptide sequence
MDKKYSIGLAIGTNSVGWAVITDEYKVPSKKFKVLGNTDRHSIKKNLIGALLFDSGETAEATRLKRTARRRYTRRKNRICYLQEIFSNEMAKVDDSFFHRLEESFLVEEDKKHERHPIFGNIVDEVAYHEKYPTIYHLRKKLVDSTDKADLRLIYLALAHMIKFRGHFLIEGDLNPDNSDVDKLFIQLVQTYNQLFEENPINASGVDAKAILSARLSKSRRLENLIAQLPGEKKNGLFGNLIALSLGLTPNFKSNFDLAEDAKLQLSKDTYDDDLDNLLAQIGDQYADLFLAAKNLSDAILLSDILRVNTEITKAPLSASMIKRYDEHHQDLTLLKALVRQQLPEKYKEIFFDQSKNGYAGYIDGGASQEEFYKFIKPILEKMDGTEELLVKLNREDLLRKQRTFDNGSIPHQIHLGELHAILRRQEDFYPFLKDNREKIEKILTFRIPYYVGPLARGNSRFAWMTRKSEETITPWNFEEVVDKGASAQSFIERMTNFDKNLPNEKVLPKHSLLYEYFTVYNELTKVKYVTEGMRKPAFLSGEQKKAIVDLLFKTNRKVTVKQLKEDYFKKIECFDSVEISGVEDRFNASLGTYHDLLKIIKDKDFLDNEENEDILEDIVLTLTLFEDREMIEERLKTYAHLFDDKVMKQLKRRRYTGWGRLSRKLINGIRDKQSGKTILDFLKSDGFANRNFMQLIHDDSLTFKEDIQKAQVSGQGDSLHEHIANLAGSPAIKKGILQTVKVVDELVKVMGRHKPENIVIEMARENQTTQKGQKNSRERMKRIEEGIKELGGSSGSETPGTSESATPESSGSEVEFSHEYWMRHALTLAKRARDEREVPVGAVLVLNNRVIGEGWNRAIGLHDPTAHAEIMALRQGGLVMQNYRLIDATLYVTFEPCVMCAGAMIHSRIGRVVFGVRNAKTGAAGSLMDVLHYPGMNHRVEITEGILADECAALLCYFFRMPRQSQILKEHPVENTQLQNEKLYLYYLQNGRDMYVDQELDINRLSDYDVDHIVPQSFLKDDSIDNKVLTRSDKNRGKSDNVPSEEVVKKMKNYWRQLLNAKLITQRKFDNLTKAERGGLSELDKAGFIKRQLVETRQITKHVAQILDSRMNTKYDENDKLIREVKVITLKSKLVSDFRKDFQFYKVREINNYHHAHDAYLNAVVGTALIKKYPKLESEFVYGDYKVYDVRKMIAKSEQEIGKATAKYFFYSNIMNFFKTEITLANGEIRKRPLIETNGETGEIVWDKGRDFATVRKVLSMPQVNIVKKTEVQTGGFSKESILPKRNSDKLIARKKDWDPKKYGGFDSPTVAYSVLVVAKVEKGKSKKLKSVKELLGITIMERSSFEKNPIDFLEAKGYKEVKKDLIIKLPKYSLFELENGRKRMLASAGELQKGNELALPSKYVNFLYLASHYEKLKGSPEDNEQKQLFVEQHKHYLDEIIEQISEFSKRVILADANLDKVLSAYNKHRDKPIREQAENIIHLFTLTNLGAPAAFKYFDTTIDRKRYTSTKEVLDATLIHQSITGLYETRIDLSQLGGD

SEQ ID NO: 291 - protein, 1541 aa, synthetic construct
  REGION 1..1541: note = 116.2 Cas9 TadAins C-term truncate 791 polypeptide sequence
MDKKYSIGLAIGTNSVGWAVITDEYKVPSKKFKVLGNTDRHSIKKNLIGALLFDSGETAEATRLKRTARRRYTRRKNRICYLQEIFSNEMAKVDDSFFHRLEESFLVEEDKKHERHPIFGNIVDEVAYHEKYPTIYHLRKKLVDSTDKADLRLIYLALAHMIKFRGHFLIEGDLNPDNSDVDKLFIQLVQTYNQLFEENPINASGVDAKAILSARLSKSRRLENLIAQLPGEKKNGLFGNLIALSLGLTPNFKSNFDLAEDAKLQLSKDTYDDDLDNLLAQIGDQYADLFLAAKNLSDAILLSDILRVNTEITKAPLSASMIKRYDEHHQDLTLLKALVRQQLPEKYKEIFFDQSKNGYAGYIDGGASQEEFYKFIKPILEKMDGTEELLVKLNREDLLRKQRTFDNGSIPHQIHLGELHAILRRQEDFYPFLKDNREKIEKILTFRIPYYVGPLARGNSRFAWMTRKSEETITPWNFEEVVDKGASAQSFIERMTNFDKNLPNEKVLPKHSLLYEYFTVYNELTKVKYVTEGMRKPAFLSGEQKKAIVDLLFKTNRKVTVKQLKEDYFKKIECFDSVEISGVEDRFNASLGTYHDLLKIIKDKDFLDNEENEDILEDIVLTLTLFEDREMIEERLKTYAHLFDDKVMKQLKRRRYTGWGRLSRKLINGIRDKQSGKTILDFLKSDGFANRNFMQLIHDDSLTFKEDIQKAQVSGQGDSLHEHIANLAGSPAIKKGILQTVKVVDELVKVMGRHKPENIVIEMARENQTTQKGQKNSRERMKRIEEGIKELGSSGSETPGTSESATPESSGSEVEFSHEYWMRHALTLAKRARDEREVPVGAVLVLNNRVIGEGWNRAIGLHDPTAHAEIMALRQGGLVMQNYRLIDATLYVTFEPCVMCAGAMIHSRIGRVVFGVRNAKTGAAGSLMDVLHYPGMNHRVEITEGILADECAALLCYFFRMPRQGSQILKEHPVENTQLQNEKLYLYYLQNGRDMYVDQELDINRLSDYDVDHIVPQSFLKDDSIDNKVLTRSDKNRGKSDNVPSEEVVKKMKNYWRQLLNAKLITQRKFDNLTKAERGGLSELDKAGFIKRQLVETRQITKHVAQILDSRMNTKYDENDKLIREVKVITLKSKLVSDFRKDFQFYKVREINNYHHAHDAYLNAVVGTALIKKYPKLESEFVYGDYKVYDVRKMIAKSEQEIGKATAKYFFYSNIMNFFKTEITLANGEIRKRPLIETNGETGEIVWDKGRDFATVRKVLSMPQVNIVKKTEVQTGGFSKESILPKRNSDKLIARKKDWDPKKYGGFDSPTVAYSVLVVAKVEKGKSKKLKSVKELLGITIMERSSFEKNPIDFLEAKGYKEVKKDLIIKLPKYSLFELENGRKRMLASAGELQKGNELALPSKYVNFLYLASHYEKLKGSPEDNEQKQLFVEQHKHYLDEIIEQISEFSKRVILADANLDKVLSAYNKHRDKPIREQAENIIHLFTLTNLGAPAAFKYFDTTIDRKRYTSTKEVLDATLIHQSITGLYETRIDLSQLGGD

SEQ ID NO: 292 - protein, 1541 aa, synthetic construct
  REGION 1..1541: note = 116.3 Cas9 TadAins C-term truncate 790 polypeptide sequence
MDKKYSIGLAIGTNSVGWAVITDEYKVPSKKFKVLGNTDRHSIKKNLIGALLFDSGETAEATRLKRTARRRYTRRKNRICYLQEIFSNEMAKVDDSFFHRLEESFLVEEDKKHERHPIFGNIVDEVAYHEKYPTIYHLRKKLVDSTDKADLRLIYLALAHMIKFRGHFLIEGDLNPDNSDVDKLFIQLVQTYNQLFEENPINASGVDAKAILSARLSKSRRLENLIAQLPGEKKNGLFGNLIALSLGLTPNFKSNFDLAEDAKLQLSKDTYDDDLDNLLAQIGDQYADLFLAAKNLSDAILLSDILRVNTEITKAPLSASMIKRYDEHHQDLTLLKALVRQQLPEKYKEIFFDQSKNGYAGYIDGGASQEEFYKFIKPILEKMDGTEELLVKLNREDLLRKQRTFDNGSIPHQIHLGELHAILRRQEDFYPFLKDNREKIEKILTFRIPYYVGPLARGNSRFAWMTRKSEETITPWNFEEVVDKGASAQSFIERMTNFDKNLPNEKVLPKHSLLYEYFTVYNELTKVKYVTEGMRKPAFLSGEQKKAIVDLLFKTNRKVTVKQLKEDYFKKIECFDSVEISGVEDRFNASLGTYHDLLKIIKDKDFLDNEENEDILEDIVLTLTLFEDREMIEERLKTYAHLFDDKVMKQLKRRRYTGWGRLSRKLINGIRDKQSGKTILDFLKSDGFANRNFMQLIHDDSLTFKEDIQKAQVSGQGDSLHEHIANLAGSPAIKKGILQTVKVVDELVKVMGRHKPENIVIEMARENQTTQKGQKNSRERMKRIEEGIKEGSSGSETPGTSESATPESSGSEVEFSHEYWMRHALTLAKRARDEREVPVGAVLVLNNRVIGEGWNRAIGLHDPTAHAEIMALRQGGLVMQNYRLIDATLYVTFEPCVMCAGAMIHSRIGRVVFGVRNAKTGAAGSLMDVLHYPGMNHRVEITEGILADECAALLCYFFRMPRQLGSQILKEHPVENTQLQNEKLYLYYLQNGRDMYVDQELDINRLSDYDVDHIVPQSFLKDDSIDNKVLTRSDKNRGKSDNVPSEEVVKKMKNYWRQLLNAKLITQRKFDNLTKAERGGLSELDKAGFIKRQLVETRQITKHVAQILDSRMNTKYDENDKLIREVKVITLKSKLVSDFRKDFQFYKVREINNYHHAHDAYLNAVVGTALIKKYPKLESEFVYGDYKVYDVRKMIAKSEQEIGKATAKYFFYSNIMNFFKTEITLANGEIRKRPLIETNGETGEIVWDKGRDFATVRKVLSMPQVNIVKKTEVQTGGFSKESILPKRNSDKLIARKKDWDPKKYGGFDSPTVAYSVLVVAKVEKGKSKKLKSVKELLGITIMERSSFEKNPIDFLEAKGYKEVKKDLIIKLPKYSLFELENGRKRMLASAGELQKGNELALPSKYVNFLYLASHYEKLKGSPEDNEQKQLFVEQHKHYLDEIIEQISEFSKRVILADANLDKVLSAYNKHRDKPIREQAENIIHLFTLTNLGAPAAFKYFDTTIDRKRYTSTKEVLDATLIHQSITGLYETRIDLSQLGGD

SEQ ID NO: 293 - protein, 1484 aa, synthetic construct
  REGION 1..1484: note = 117 Cas9 delta 1017-1069 polypeptide sequence
MDKKYSIGLAIGTNSVGWAVITDEYKVPSKKFKVLGNTDRHSIKKNLIGALLFDSGETAEATRLKRTARRRYTRRKNRICYLQEIFSNEMAKVDDSFFHRLEESFLVEEDKKHERHPIFGNIVDEVAYHEKYPTIYHLRKKLVDSTDKADLRLIYLALAHMIKFRGHFLIEGDLNPDNSDVDKLFIQLVQTYNQLFEENPINASGVDAKAILSARLSKSRRLENLIAQLPGEKKNGLFGNLIALSLGLTPNFKSNFDLAEDAKLQLSKDTYDDDLDNLLAQIGDQYADLFLAAKNLSDAILLSDILRVNTEITKAPLSASMIKRYDEHHQDLTLLKALVRQQLPEKYKEIFFDQSKNGYAGYIDGGASQEEFYKFIKPILEKMDGTEELLVKLNREDLLRKQRTFDNGSIPHQIHLGELHAILRRQEDFYPFLKDNREKIEKILTFRIPYYVGPLARGNSRFAWMTRKSEETITPWNFEEVVDKGASAQSFIERMTNFDKNLPNEKVLPKHSLLYEYFTVYNELTKVKYVTEGMRKPAFLSGEQKKAIVDLLFKTNRKVTVKQLKEDYFKKIECFDSVEISGVEDRFNASLGTYHDLLKIIKDKDFLDNEENEDILEDIVLTLTLFEDREMIEERLKTYAHLFDDKVMKQLKRRRYTGWGRLSRKLINGIRDKQSGKTILDFLKSDGFANRNFMQLIHDDSLTFKEDIQKAQVSGQGDSLHEHIANLAGSPAIKKGILQTVKVVDELVKVMGRHKPENIVIEMARENQTTQKGQKNSRERMKRIEEGIKELGSQILKEHPVENTQLQNEKLYLYYLQNGRDMYVDQELDINRLSDYDVDHIVPQSFLKDDSIDNKVLTRSDKNRGKSDNVPSEEVVKKMKNYWRQLLNAKLITQRKFDNLTKAERGGLSELDKAGFIKRQLVETRQITKHVAQILDSRMNTKYDENDKLIREVKVITLKSKLVSDFRKDFQFYKVREINNYHHAHDAYLNAVVGTALIKKYPKLESEFVYGDYKVYSSGSEVEFSHEYWMRHALTLAKRARDEREVPVGAVLVLNNRVIGEGWNRAIGLHDPTAHAEIMALRQGGLVMQNYRLIDATLYVTFEPCVMCAGAMIHSRIGRVVFGVRNAKTGAAGSLMDVLHYPGMNHRVEITEGILADECAALLCYFFRMPRQVFNAQKKAQSSTDGEIVWDKGRDFATVRKVLSMPQVNIVKKTEVQTGGFSKESILPKRNSDKLIARKKDWDPKKYGGFDSPTVAYSVLVVAKVEKGKSKKLKSVKELLGITIMERSSFEKNPIDFLEAKGYKEVKKDLIIKLPKYSLFELENGRKRMLASAGELQKGNELALPSKYVNFLYLASHYEKLKGSPEDNEQKQLFVEQHKHYLDEIIEQISEFSKRVILADANLDKVLSAYNKHRDKPIREQAENIIHLFTLTNLGAPAAFKYFDTTIDRKRYTSTKEVLDATLIHQSITGLYETRIDLSQLGGD

SEQ ID NO: 294 - protein, 1554 aa, synthetic construct
  REGION 1..1554: note = 118 Cas9 TadA-CP116ins 1067 polypeptide sequence
MDKKYSIGLAIGTNSVGWAVITDEYKVPSKKFKVLGNTDRHSIKKNLIGALLFDSGETAEATRLKRTARRRYTRRKNRICYLQEIFSNEMAKVDDSFFHRLEESFLVEEDKKHERHPIFGNIVDEVAYHEKYPTIYHLRKKLVDSTDKADLRLIYLALAHMIKFRGHFLIEGDLNPDNSDVDKLFIQLVQTYNQLFEENPINASGVDAKAILSARLSKSRRLENLIAQLPGEKKNGLFGNLIALSLGLTPNFKSNFDLAEDAKLQLSKDTYDDDLDNLLAQIGDQYADLFLAAKNLSDAILLSDILRVNTEITKAPLSASMIKRYDEHHQDLTLLKALVRQQLPEKYKEIFFDQSKNGYAGYIDGGASQEEFYKFIKPILEKMDGTEELLVKLNREDLLRKQRTFDNGSIPHQIHLGELHAILRRQEDFYPFLKDNREKIEKILTFRIPYYVGPLARGNSRFAWMTRKSEETITPWNFEEVVDKGASAQSFIERMTNFDKNLPNEKVLPKHSLLYEYFTVYNELTKVKYVTEGMRKPAFLSGEQKKAIVDLLFKTNRKVTVKQLKEDYFKKIECFDSVEISGVEDRFNASLGTYHDLLKIIKDKDFLDNEENEDILEDIVLTLTLFEDREMIEERLKTYAHLFDDKVMKQLKRRRYTGWGRLSRKLINGIRDKQSGKTILDFLKSDGFANRNFMQLIHDDSLTFKEDIQKAQVSGQGDSLHEHIANLAGSPAIKKGILQTVKVVDELVKVMGRHKPENIVIEMARENQTTQKGQKNSRERMKRIEEGIKELGSQILKEHPVENTQLQNEKLYLYYLQNGRDMYVDQELDINRLSDYDVDHIVPQSFLKDDSIDNKVLTRSDKNRGKSDNVPSEEVVKKMKNYWRQLLNAKLITQRKFDNLTKAERGGLSELDKAGFIKRQLVETRQITKHVAQILDSRMNTKYDENDKLIREVKVITLKSKLVSDFRKDFQFYKVREINNYHHAHDAYLNAVVGTALIKKYPKLESEFVYGDYKVYDVRKMIAKSEQEIGKATAKYFFYSNIMNFFKTEITLANGEIRKRPLIETNMNHRVEITEGILADECAALLCYFFRMPRQVFNAQKKAQSSTDGSSGSETPGTSESATPESSGSEVEFSHEYWMRHALTLAKRARDEREVPVGAVLVLNNRVIGEGWNRAIGLHDPTAHAEIMALRQGGLVMQNYRLIDATLYVTFEPCVMCAGAMIHSRIGRVVFGVRNAKTGAAGSLMDVLHYPGGETGEIVWDKGRDFATVRKVLSMPQVNIVKKTEVQTGGFSKESILPKRNSDKLIARKKDWDPKKYGGFDSPTVAYSVLVVAKVEKGKSKKLKSVKELLGITIMERSSFEKNPIDFLEAKGYKEVKKDLIIKLPKYSLFELENGRKRMLASAGELQKGNELALPSKYVNFLYLASHYEKLKGSPEDNEQKQLFVEQHKHYLDEIIEQISEFSKRVILADANLDKVLSAYNKHRDKPIREQAENIIHLFTLTNLGAPAAFKYFDTTIDRKRYTSTKEVLDATLIHQSITGLYETRIDLSQLGGD

SEQ ID NO: 295 - protein, 1554 aa, synthetic construct
  REGION 1..1554: note = 119 Cas9 TadAins 701 polypeptide sequence
MDKKYSIGLAIGTNSVGWAVITDEYKVPSKKFKVLGNTDRHSIKKNLIGALLFDSGETAEATRLKRTARRRYTRRKNRICYLQEIFSNEMAKVDDSFFHRLEESFLVEEDKKHERHPIFGNIVDEVAYHEKYPTIYHLRKKLVDSTDKADLRLIYLALAHMIKFRGHFLIEGDLNPDNSDVDKLFIQLVQTYNQLFEENPINASGVDAKAILSARLSKSRRLENLIAQLPGEKKNGLFGNLIALSLGLTPNFKSNFDLAEDAKLQLSKDTYDDDLDNLLAQIGDQYADLFLAAKNLSDAILLSDILRVNTEITKAPLSASMIKRYDEHHQDLTLLKALVRQQLPEKYKEIFFDQSKNGYAGYIDGGASQEEFYKFIKPILEKMDGTEELLVKLNREDLLRKQRTFDNGSIPHQIHLGELHAILRRQEDFYPFLKDNREKIEKILTFRIPYYVGPLARGNSRFAWMTRKSEETITPWNFEEVVDKGASAQSFIERMTNFDKNLPNEKVLPKHSLLYEYFTVYNELTKVKYVTEGMRKPAFLSGEQKKAIVDLLFKTNRKVTVKQLKEDYFKKIECFDSVEISGVEDRFNASLGTYHDLLKIIKDKDFLDNEENEDILEDIVLTLTLFEDREMIEERLKTYAHLFDDKVMKQLKRRRYTGWGRLSRKLINGIRDKQSGKTILDFLKSDGFANRNFMQLIHDDSGSSGSETPGTSESATPESSGSEVEFSHEYWMRHALTLAKRARDEREVPVGAVLVLNNRVIGEGWNRAIGLHDPTAHAEIMALRQGGLVMQNYRLIDATLYVTFEPCVMCAGAMIHSRIGRVVFGVRNAKTGAAGSLMDVLHYPGMNHRVEITEGILADECAALLCYFFRMPRQVFNAQKKAQSSTDLTFKEDIQKAQVSGQGDSLHEHIANLAGSPAIKKGILQTVKVVDELVKVMGRHKPENIVIEMARENQTTQKGQKNSRERMKRIEEGIKELGSQILKEHPVENTQLQNEKLYLYYLQNGRDMYVDQELDINRLSDYDVDHIVPQSFLKDDSIDNKVLTRSDKNRGKSDNVPSEEVVKKMKNYWRQLLNAKLITQRKFDNLTKAERGGLSELDKAGFIKRQLVETRQITKHVAQILDSRMNTKYDENDKLIREVKVITLKSKLVSDFRKDFQFYKVREINNYHHAHDAYLNAVVGTALIKKYPKLESEFVYGDYKVYDVRKMIAKSEQEIGKATAKYFFYSNIMNFFKTEITLANGEIRKRPLIETNGETGEIVWDKGRDFATVRKVLSMPQVNIVKKTEVQTGGFSKESILPKRNSDKLIARKKDWDPKKYGGFDSPTVAYSVLVVAKVEKGKSKKLKSVKELLGITIMERSSFEKNPIDFLEAKGYKEVKKDLIIKLPKYSLFELENGRKRMLASAGELQKGNELALPSKYVNFLYLASHYEKLKGSPEDNEQKQLFVEQHKHYLDEIIEQISEFSKRVILADANLDKVLSAYNKHRDKPIREQAENIIHLFTLTNLGAPAAFKYFDTTIDRKRYTSTKEVLDATLIHQSITGLYETRIDLSQLGGD

SEQ ID NO: 296 - protein, 1554 aa, synthetic construct
  REGION 1..1554: note = 120 Cas9 TadACP136ins 1248 polypeptide sequence
MDKKYSIGLAIGTNSVGWAVITDEYKVPSKKFKVLGNTDRHSIKKNLIGALLFDSGETAEATRLKRTARRRYTRRKNRICYLQEIFSNEMAKVDDSFFHRLEESFLVEEDKKHERHPIFGNIVDEVAYHEKYPTIYHLRKKLVDSTDKADLRLIYLALAHMIKFRGHFLIEGDLNPDNSDVDKLFIQLVQTYNQLFEENPINASGVDAKAILSARLSKSRRLENLIAQLPGEKKNGLFGNLIALSLGLTPNFKSNFDLAEDAKLQLSKDTYDDDLDNLLAQIGDQYADLFLAAKNLSDAILLSDILRVNTEITKAPLSASMIKRYDEHHQDLTLLKALVRQQLPEKYKEIFFDQSKNGYAGYIDGGASQEEFYKFIKPILEKMDGTEELLVKLNREDLLRKQRTFDNGSIPHQIHLGELHAILRRQEDFYPFLKDNREKIEKILTFRIPYYVGPLARGNSRFAWMTRKSEETITPWNFEEVVDKGASAQSFIERMTNFDKNLPNEKVLPKHSLLYEYFTVYNELTKVKYVTEGMRKPAFLSGEQKKAIVDLLFKTNRKVTVKQLKEDYFKKIECFDSVEISGVEDRFNASLGTYHDLLKIIKDKDFLDNEENEDILEDIVLTLTLFEDREMIEERLKTYAHLFDDKVMKQLKRRRYTGWGRLSRKLINGIRDKQSGKTILDFLKSDGFANRNFMQLIHDDSLTFKEDIQKAQVSGQGDSLHEHIANLAGSPAIKKGILQTVKVVDELVKVMGRHKPENIVIEMARENQTTQKGQKNSRERMKRIEEGIKELGSQILKEHPVENTQLQNEKLYLYYLQNGRDMYVDQELDINRLSDYDVDHIVPQSFLKDDSIDNKVLTRSDKNRGKSDNVPSEEVVKKMKNYWRQLLNAKLITQRKFDNLTKAERGGLSELDKAGFIKRQLVETRQITKHVAQILDSRMNTKYDENDKLIREVKVITLKSKLVSDFRKDFQFYKVREINNYHHAHDAYLNAVVGTALIKKYPKLESEFVYGDYKVYDVRKMIAKSEQEIGKATAKYFFYSNIMNFFKTEITLANGEIRKRPLIETNGETGEIVWDKGRDFATVRKVLSMPQVNIVKKTEVQTGGFSKESILPKRNSDKLIARKKDWDPKKYGGFDSPTVAYSVLVVAKVEKGKSKKLKSVKELLGITIMERSSFEKNPIDFLEAKGYKEVKKDLIIKLPKYSLFELENGRKRMLASAGELQKGNELALPSKYVNFLYLASHYEKLKGSMNHRVEITEGILADECAALLCYFFRMPRQVFNAQKKAQSSTDGSSGSETPGTSESATPESSGSEVEFSHEYWMRHALTLAKRARDEREVPVGAVLVLNNRVIGEGWNRAIGLHDPTAHAEIMALRQGGLVMQNYRLIDATLYVTFEPCVMCAGAMIHSRIGRVVFGVRNAKTGAAGSLMDVLHYPGPEDNEQKQLFVEQHKHYLDEIIEQISEFSKRVILADANLDKVLSAYNKHRDKPIREQAENIIHLFTLTNLGAPAAFKYFDTTIDRKRYTSTKEVLDATLIHQSITGLYETRIDLSQLGGD

SEQ ID NO: 297 - protein, 1554 aa, synthetic construct
  REGION 1..1554: note = 121 Cas9 TadACP136ins 1052 polypeptide sequence
MDKKYSIGLAIGTNSVGWAVITDEYKVPSKKFKVLGNTDRHSIKKNLIGALLFDSGETAEATRLKRTARRRYTRRKNRICYLQEIFSNEMAKVDDSFFHRLEESFLVEEDKKHERHPIFGNIVDEVAYHEKYPTIYHLRKKLVDSTDKADLRLIYLALAHMIKFRGHFLIEGDLNPDNSDVDKLFIQLVQTYNQLFEENPINASGVDAKAILSARLSKSRRLENLIAQLPGEKKNGLFGNLIALSLGLTPNFKSNFDLAEDAKLQLSKDTYDDDLDNLLAQIGDQYADLFLAAKNLSDAILLSDILRVNTEITKAPLSASMIKRYDEHHQDLTLLKALVRQQLPEKYKEIFFDQSKNGYAGYIDGGASQEEFYKFIKPILEKMDGTEELLVKLNREDLLRKQRTFDNGSIPHQIHLGELHAILRRQEDFYPFLKDNREKIEKILTFRIPYYVGPLARGNSRFAWMTRKSEETITPWNFEEVVDKGASAQSFIERMTNFDKNLPNEKVLPKHSLLYEYFTVYNELTKVKYVTEGMRKPAFLSGEQKKAIVDLLFKTNRKVTVKQLKEDYFKKIECFDSVEISGVEDRFNASLGTYHDLLKIIKDKDFLDNEENEDILEDIVLTLTLFEDREMIEERLKTYAHLFDDKVMKQLKRRRYTGWGRLSRKLINGIRDKQSGKTILDFLKSDGFANRNFMQLIHDDSLTFKEDIQKAQVSGQGDSLHEHIANLAGSPAIKKGILQTVKVVDELVKVMGRHKPENIVIEMARENQTTQKGQKNSRERMKRIEEGIKELGSQILKEHPVENTQLQNEKLYLYYLQNGRDMYVDQELDINRLSDYDVDHIVPQSFLKDDSIDNKVLTRSDKNRGKSDNVPSEEVVKKMKNYWRQLLNAKLITQRKFDNLTKAERGGLSELDKAGFIKRQLVETRQITKHVAQILDSRMNTKYDENDKLIREVKVITLKSKLVSDFRKDFQFYKVREINNYHHAHDAYLNAVVGTALIKKYPKLESEFVYGDYKVYDVRKMIAKSEQEIGKATAKYFFYSNIMNFFKTEITLAMNHRVEITEGILADECAALLCYFFRMPRQVFNAQKKAQSSTDGSSGSETPGTSESATPESSGSEVEFSHEYWMRHALTLAKRARDEREVPVGAVLVLNNRVIGEGWNRAIGLHDPTAHAEIMALRQGGLVMQNYRLIDATLYVTFEPCVMCAGAMIHSRIGRVVFGVRNAKTGAAGSLMDVLHYPGNGEIRKRPLIETNGETGEIVWDKGRDFATVRKVLSMPQVNIVKKTEVQTGGFSKESILPKRNSDKLIARKKDWDPKKYGGFDSPTVAYSVLVVAKVEKGKSKKLKSVKELLGITIMERSSFEKNPIDFLEAKGYKEVKKDLIIKLPKYSLFELENGRKRMLASAGELQKGNELALPSKYVNFLYLASHYEKLKGSPEDNEQKQLFVEQHKHYLDEIIEQISEFSKRVILADANLDKVLSAYNKHRDKPIREQAENIIHLFTLTNLGAPAAFKYFDTTIDRKRYTSTKEVLDATLIHQSITGLYETRIDLSQLGGD

SEQ ID NO: 298 - protein, 1554 aa, synthetic construct
  REGION 1..1554: note = 122 Cas9 TadACP136ins 1041 polypeptide sequence
MDKKYSIGLAIGTNSVGWAVITDEYKVPSKKFKVLGNTDRHSIKKNLIGALLFDSGETAEATRLKRTARRRYTRRKNRICYLQEIFSNEMAKVDDSFFHRLEESFLVEEDKKHERHPIFGNIVDEVAYHEKYPTIYHLRKKLVDSTDKADLRLIYLALAHMIKFRGHFLIEGDLNPDNSDVDKLFIQLVQTYNQLFEENPINASGVDAKAILSARLSKSRRLENLIAQLPGEKKNGLFGNLIALSLGLTPNFKSNFDLAEDAKLQLSKDTYDDDLDNLLAQIGDQYADLFLAAKNLSDAILLSDILRVNTEITKAPLSASMIKRYDEHHQDLTLLKALVRQQLPEKYKEIFFDQSKNGYAGYIDGGASQEEFYKFIKPILEKMDGTEELLVKLNREDLLRKQRTFDNGSIPHQIHLGELHAILRRQEDFYPFLKDNREKIEKILTFRIPYYVGPLARGNSRFAWMTRKSEETITPWNFEEVVDKGASAQSFIERMTNFDKNLPNEKVLPKHSLLYEYFTVYNELTKVKYVTEGMRKPAFLSGEQKKAIVDLLFKTNRKVTVKQLKEDYFKKIECFDSVEISGVEDRFNASLGTYHDLLKIIKDKDFLDNEENEDILEDIVLTLTLFEDREMIEERLKTYAHLFDDKVMKQLKRRRYTGWGRLSRKLINGIRDKQSGKTILDFLKSDGFANRNFMQLIHDDSLTFKEDIQKAQVSGQGDSLHEHIANLAGSPAIKKGILQTVKVVDELVKVMGRHKPENIVIEMARENQTTQKGQKNSRERMKRIEEGIKELGSQILKEHPVENTQLQNEKLYLYYLQNGRDMYVDQELDINRLSDYDVDHIVPQSFLKDDSIDNKVLTRSDKNRGKSDNVPSEEVVKKMKNYWRQLLNAKLITQRKFDNLTKAERGGLSELDKAGFIKRQLVETRQITKHVAQILDSRMNTKYDENDKLIREVKVITLKSKLVSDFRKDFQFYKVREINNYHHAHDAYLNAVVGTALIKKYPKLESEFVYGDYKVYDVRKMIAKSEQEIGKATAKYFFYSMNHRVEITEGILADECAALLCYFFRMPRQVFNAQKKAQSSTDGSSGSETPGTSESATPESSGSEVEFSHEYWMRHALTLAKRARDEREVPVGAVLVLNNRVIGEGWNRAIGLHDPTAHAEIMALRQGGLVMQNYRLIDATLYVTFEPCVMCAGAMIHSRIGRVVFGVRNAKTGAAGSLMDVLHYPGNIMNFFKTEITLANGEIRKRPLIETNGETGEIVWDKGRDFATVRKVLSMPQVNIVKKTEVQTGGFSKESILPKRNSDKLIARKKDWDPKKYGGFDSPTVAYSVLVVAKVEKGKSKKLKSVKELLGITIMERSSFEKNPIDFLEAKGYKEVKKDLIIKLPKYSLFELENGRKRMLASAGELQKGNELALPSKYVNFLYLASHYEKLKGSPEDNEQKQLFVEQHKHYLDEIIEQISEFSKRVILADANLDKVLSAYNKHRDKPIREQAENIIHLFTLTNLGAPAAFKYFDTTIDRKRYTSTKEVLDATLIHQSITGLYETRIDLSQLGGD

SEQ ID NO: 299 - protein, 1554 aa, synthetic construct
  REGION 1..1554: note = 123 Cas9 TadACP139ins 1299 polypeptide sequence
MDKKYSIGLAIGTNSVGWAVITDEYKVPSKKFKVLGNTDRHSIKKNLIGALLFDSGETAEATRLKRTARRRYTRRKNRICYLQEIFSNEMAKVDDSFFHRLEESFLVEEDKKHERHPIFGNIVDEVAYHEKYPTIYHLRKKLVDSTDKADLRLIYLALAHMIKFRGHFLIEGDLNPDNSDVDKLFIQLVQTYNQLFEENPINASGVDAKAILSARLSKSRRLENLIAQLPGEKKNGLFGNLIALSLGLTPNFKSNFDLAEDAKLQLSKDTYDDDLDNLLAQIGDQYADLFLAAKNLSDAILLSDILRVNTEITKAPLSASMIKRYDEHHQDLTLLKALVRQQLPEKYKEIFFDQSKNGYAGYIDGGASQEEFYKFIKPILEKMDGTEELLVKLNREDLLRKQRTFDNGSIPHQIHLGELHAILRRQEDFYPFLKDNREKIEKILTFRIPYYVGPLARGNSRFAWMTRKSEETITPWNFEEVVDKGASAQSFIERMTNFDKNLPNEKVLPKHSLLYEYFTVYNELTKVKYVTEGMRKPAFLSGEQKKAIVDLLFKTNRKVTVKQLKEDYFKKIECFDSVEISGVEDRFNASLGTYHDLLKIIKDKDFLDNEENEDILEDIVLTLTLFEDREMIEERLKTYAHLFDDKVMKQLKRRRYTGWGRLSRKLINGIRDKQSGKTILDFLKSDGFANRNFMQLIHDDSLTFKEDIQKAQVSGQGDSLHEHIANLAGSPAIKKGILQTVKVVDELVKVMGRHKPENIVIEMARENQTTQKGQKNSRERMKRIEEGIKELGSQILKEHPVENTQLQNEKLYLYYLQNGRDMYVDQELDINRLSDYDVDHIVPQSFLKDDSIDNKVLTRSDKNRGKSDNVPSEEVVKKMKNYWRQLLNAKLITQRKFDNLTKAERGGLSELDKAGFIKRQLVETRQITKHVAQILDSRMNTKYDENDKLIREVKVITLKSKLVSDFRKDFQFYKVREINNYHHAHDAYLNAVVGTALIKKYPKLESEFVYGDYKVYDVRKMIAKSEQEIGKATAKYFFYSNIMNFFKTEITLANGEIRKRPLIETNGETGEIVWDKGRDFATVRKVLSMPQVNIVKKTEVQTGGFSKESILPKRNSDKLIARKKDWDPKKYGGFDSPTVAYSVLVVAKVEKGKSKKLKSVKELLGITIMERSSFEKNPIDFLEAKGYKEVKKDLIIKLPKYSLFELENGRKRMLASAGELQKGNELALPSKYVNFLYLASHYEKLKGSPEDNEQKQLFVEQHKHYLDEIIEQISEFSKRVILADANLDKVLSAYNKHRMNHRVEITEGILADECAALLCYFFRMPRQVFNAQKKAQSSTDGSSGSETPGTSESATPESSGSEVEFSHEYWMRHALTLAKRARDEREVPVGAVLVLNNRVIGEGWNRAIGLHDPTAHAEIMALRQGGLVMQNYRLIDATLYVTFEPCVMCAGAMIHSRIGRVVFGVRNAKTGAAGSLMDVLHYPGDKPIREQAENIIHLFTLTNLGAPAAFKYFDTTIDRKRYTSTKEVLDATLIHQSITGLYETRIDLSQLGGD

SEQ ID NO: 300 - protein, 1454 aa, synthetic construct
  REGION 1..1454: note = 124 Cas9 delta 792-872TadAins polypeptide sequence
MDKKYSIGLAIGTNSVGWAVITDEYKVPSKKFKVLGNTDRHSIKKNLIGALLFDSGETAEATRLKRTARRRYTRRKNRICYLQEIFSNEMAKVDDSFFHRLEESFLVEEDKKHERHPIFGNIVDEVAYHEKYPTIYHLRKKLVDSTDKADLRLIYLALAHMIKFRGHFLIEGDLNPDNSDVDKLFIQLVQTYNQLFEENPINASGVDAKAILSARLSKSRRLENLIAQLPGEKKNGLFGNLIALSLGLTPNFKSNFDLAEDAKLQLSKDTYDDDLDNLLAQIGDQYADLFLAAKNLSDAILLSDILRVNTEITKAPLSASMIKRYDEHHQDLTLLKALVRQQLPEKYKEIFFDQSKNGYAGYIDGGASQEEFYKFIKPILEKMDGTEELLVKLNREDLLRKQRTFDNGSIPHQIHLGELHAILRRQEDFYPFLKDNREKIEKILTFRIPYYVGPLARGNSRFAWMTRKSEETITPWNFEEVVDKGASAQSFIERMTNFDKNLPNEKVLPKHSLLYEYFTVYNELTKVKYVTEGMRKPAFLSGEQKKAIVDLLFKTNRKVTVKQLKEDYFKKIECFDSVEISGVEDRFNASLGTYHDLLKIIKDKDFLDNEENEDILEDIVLTLTLFEDREMIEERLKTYAHLFDDKVMKQLKRRRYTGWGRLSRKLINGIRDKQSGKTILDFLKSDGFANRNFMQLIHDDSLTFKEDIQKAQVSGQGDSLHEHIANLAGSPAIKKGILQTVKVVDELVKVMGRHKPENIVIEMARENQTTQKGQKNSRERMKRIEEGIKELGSEVEFSHEYWMRHALTLAKRARDEREVPVGAVLVLNNRVIGEGWNRAIGLHDPTAHAEIMALRQGGLVMQNYRLIDATLYVTFEPCVMCAGAMIHSRIGRVVFGVRNAKTGAAGSLMDVLHYPGMNHRVEITEGILADECAALLCYFFRMPRQVFNAQKKAQSSTDEEVVKKMKNYWRQLLNAKLITQRKFDNLTKAERGGLSELDKAGFIKRQLVETRQITKHVAQILDSRMNTKYDENDKLIREVKVITLKSKLVSDFRKDFQFYKVREINNYHHAHDAYLNAVVGTALIKKYPKLESEFVYGDYKVYDVRKMIAKSEQEIGKATAKYFFYSNIMNFFKTEITLANGEIRKRPLIETNGETGEIVWDKGRDFATVRKVLSMPQVNIVKKTEVQTGGFSKESILPKRNSDKLIARKKDWDPKKYGGFDSPTVAYSVLVVAKVEKGKSKKLKSVKELLGITIMERSSFEKNPIDFLEAKGYKEVKKDLIIKLPKYSLFELENGRKRMLASAGELQKGNELALPSKYVNFLYLASHYEKLKGSPEDNEQKQLFVEQHKHYLDEIIEQISEFSKRVILADANLDKVLSAYNKHRDKPIREQAENIIHLFTLTNLGAPAAFKYFDTTIDRKRYTSTKEVLDATLIHQSITGLYETRIDLSQLGGD

SEQ ID NO: 301 - protein, 1420 aa, synthetic construct
  REGION 1..1420: note = 125 Cas9 delta 792-906TadAins polypeptide sequence
MDKKYSIGLAIGTNSVGWAVITDEYKVPSKKFKVLGNTDRHSIKKNLIGALLFDSGETAEATRLKRTARRRYTRRKNRICYLQEIFSNEMAKVDDSFFHRLEESFLVEEDKKHERHPIFGNIVDEVAYHEKYPTIYHLRKKLVDSTDKADLRLIYLALAHMIKFRGHFLIEGDLNPDNSDVDKLFIQLVQTYNQLFEENPINASGVDAKAILSARLSKSRRLENLIAQLPGEKKNGLFGNLIALSLGLTPNFKSNFDLAEDAKLQLSKDTYDDDLDNLLAQIGDQYADLFLAAKNLSDAILLSDILRVNTEITKAPLSASMIKRYDEHHQDLTLLKALVRQQLPEKYKEIFFDQSKNGYAGYIDGGASQEEFYKFIKPILEKMDGTEELLVKLNREDLLRKQRTFDNGSIPHQIHLGELHAILRRQEDFYPFLKDNREKIEKILTFRIPYYVGPLARGNSRFAWMTRKSEETITPWNFEEVVDKGASAQSFIERMTNFDKNLPNEKVLPKHSLLYEYFTVYNELTKVKYVTEGMRKPAFLSGEQKKAIVDLLFKTNRKVTVKQLKEDYFKKIECFDSVEISGVEDRFNASLGTYHDLLKIIKDKDFLDNEENEDILEDIVLTLTLFEDREMIEERLKTYAHLFDDKVMKQLKRRRYTGWGRLSRKLINGIRDKQSGKTILDFLKSDGFANRNFMQLIHDDSLTFKEDIQKAQVSGQGDSLHEHIANLAGSPAIKKGILQTVKVVDELVKVMGRHKPENIVIEMARENQTTQKGQKNSRERMKRIEEGIKELGSEVEFSHEYWMRHALTLAKRARDEREVPVGAVLVLNNRVIGEGWNRAIGLHDPTAHAEIMALRQGGLVMQNYRLIDATLYVTFEPCVMCAGAMIHSRIGRVVFGVRNAKTGAAGSLMDVLHYPGMNHRVEITEGILADECAALLCYFFRMPRQVFNAQKKAQSSTDGLSELDKAGFIKRQLVETRQITKHVAQILDSRMNTKYDENDKLIREVKVITLKSKLVSDFRKDFQFYKVREINNYHHAHDAYLNAVVGTALIKKYPKLESEFVYGDYKVYDVRKMIAKSEQEIGKATAKYFFYSNIMNFFKTEITLANGEIRKRPLIETNGETGEIVWDKGRDFATVRKVLSMPQVNIVKKTEVQTGGFSKESILPKRNSDKLIARKKDWDPKKYGGFDSPTVAYSVLVVAKVEKGKSKKLKSVKELLGITIMERSSFEKNPIDFLEAKGYKEVKKDLIIKLPKYSLFELENGRKRMLASAGELQKGNELALPSKYVNFLYLASHYEKLKGSPEDNEQKQLFVEQHKHYLDEIIEQISEFSKRVILADANLDKVLSAYNKHRDKPIREQAENIIHLFTLTNLGAPAAFKYFDTTIDRKRYTSTKEVLDATLIHQSITGLYETRIDLSQLGGD

SEQ ID NO: 302 - protein, 1554 aa, synthetic construct
  REGION 1..1554: note = 126 TadA CP65ins 1003 polypeptide sequence
MDKKYSIGLAIGTNSVGWAVITDEYKVPSKKFKVLGNTDRHSIKKNLIGALLFDSGETAEATRLKRTARRRYTRRKNRICYLQEIFSNEMAKVDDSFFHRLEESFLVEEDKKHERHPIFGNIVDEVAYHEKYPTIYHLRKKLVDSTDKADLRLIYLALAHMIKFRGHFLIEGDLNPDNSDVDKLFIQLVQTYNQLFEENPINASGVDAKAILSARLSKSRRLENLIAQLPGEKKNGLFGNLIALSLGLTPNFKSNFDLAEDAKLQLSKDTYDDDLDNLLAQIGDQYADLFLAAKNLSDAILLSDILRVNTEITKAPLSASMIKRYDEHHQDLTLLKALVRQQLPEKYKEIFFDQSKNGYAGYIDGGASQEEFYKFIKPILEKMDGTEELLVKLNREDLLRKQRTFDNGSIPHQIHLGELHAILRRQEDFYPFLKDNREKIEKILTFRIPYYVGPLARGNSRFAWMTRKSEETITPWNFEEVVDKGASAQSFIERMTNFDKNLPNEKVLPKHSLLYEYFTVYNELTKVKYVTEGMRKPAFLSGEQKKAIVDLLFKTNRKVTVKQLKEDYFKKIECFDSVEISGVEDRFNASLGTYHDLLKIIKDKDFLDNEENEDILEDIVLTLTLFEDREMIEERLKTYAHLFDDKVMKQLKRRRYTGWGRLSRKLINGIRDKQSGKTILDFLKSDGFANRNFMQLIHDDSLTFKEDIQKAQVSGQGDSLHEHIANLAGSPAIKKGILQTVKVVDELVKVMGRHKPENIVIEMARENQTTQKGQKNSRERMKRIEEGIKELGSQILKEHPVENTQLQNEKLYLYYLQNGRDMYVDQELDINRLSDYDVDHIVPQSFLKDDSIDNKVLTRSDKNRGKSDNVPSEEVVKKMKNYWRQLLNAKLITQRKFDNLTKAERGGLSELDKAGFIKRQLVETRQITKHVAQILDSRMNTKYDENDKLIREVKVITLKSKLVSDFRKDFQFYKVREINNYHHAHDAYLNAVVGTALIKKYPKTAHAEIMALRQGGLVMQNYRLIDATLYVTFEPCVMCAGAMIHSRIGRVVFGVRNAKTGAAGSLMDVLHYPGMNHRVEITEGILADECAALLCYFFRMPRQVFNAQKKAQSSTDGSSGSETPGTSESATPESSGSEVEFSHEYWMRHALTLAKRARDEREVPVGAVLVLNNRVIGEGWNRAIGLHDPLESEFVYGDYKVYDVRKMIAKSEQEIGKATAKYFFYSNIMNFFKTEITLANGEIRKRPLIETNGETGEIVWDKGRDFATVRKVLSMPQVNIVKKTEVQTGGFSKESILPKRNSDKLIARKKDWDPKKYGGFDSPTVAYSVLVVAKVEKGKSKKLKSVKELLGITIMERSSFEKNPIDFLEAKGYKEVKKDLIIKLPKYSLFELENGRKRMLASAGELQKGNELALPSKYVNFLYLASHYEKLKGSPEDNEQKQLFVEQHKHYLDEIIEQISEFSKRVILADANLDKVLSAYNKHRDKPIREQAENIIHLFTLTNLGAPAAFKYFDTTIDRKRYTSTKEVLDATLIHQSITGLYETRIDLSQLGGD

SEQ ID NO: 303 - protein, 1554 aa, synthetic construct
  REGION 1..1554: note = 127 TadA CP65ins 1016 polypeptide sequence
MDKKYSIGLAIGTNSVGWAVITDEYKVPSKKFKVLGNTDRHSIKKNLIGALLFDSGETAEATRLKRTARRRYTRRKNRICYLQEIFSNEMAKVDDSFFHRLEESFLVEEDKKHERHPIFGNIVDEVAYHEKYPTIYHLRKKLVDSTDKADLRLIYLALAHMIKFRGHFLIEGDLNPDNSDVDKLFIQLVQTYNQLFEENPINASGVDAKAILSARLSKSRRLENLIAQLPGEKKNGLFGNLIALSLGLTPNFKSNFDLAEDAKLQLSKDTYDDDLDNLLAQIGDQYADLFLAAKNLSDAILLSDILRVNTEITKAPLSASMIKRYDEHHQDLTLLKALVRQQLPEKYKEIFFDQSKNGYAGYIDGGASQEEFYKFIKPILEKMDGTEELLVKLNREDLLRKQRTFDNGSIPHQIHLGELHAILRRQEDFYPFLKDNREKIEKILTFRIPYYVGPLARGNSRFAWMTRKSEETITPWNFEEVVDKGASAQSFIERMTNFDKNLPNEKVLPKHSLLYEYFTVYNELTKVKYVTEGMRKPAFLSGEQKKAIVDLLFKTNRKVTVKQLKEDYFKKIECFDSVEISGVEDRFNASLGTYHDLLKIIKDKDFLDNEENEDILEDIVLTLTLFEDREMIEERLKTYAHLFDDKVMKQLKRRRYTGWGRLSRKLINGIRDKQSGKTILDFLKSDGFANRNFMQLIHDDSLTFKEDIQKAQVSGQGDSLHEHIANLAGSPAIKKGILQTVKVVDELVKVMGRHKPENIVIEMARENQTTQKGQKNSRERMKRIEEGIKELGSQILKEHPVENTQLQNEKLYLYYLQNGRDMYVDQELDINRLSDYDVDHIVPQSFLKDDSIDNKVLTRSDKNRGKSDNVPSEEVVKKMKNYWRQLLNAKLITQRKFDNLTKAERGGLSELDKAGFIKRQLVETRQITKHVAQILDSRMNTKYDENDKLIREVKVITLKSKLVSDFRKDFQFYKVREINNYHHAHDAYLNAVVGTALIKKYPKLESEFVYGDYKVTAHAEIMALRQGGLVMQNYRLIDATLYVTFEPCVMCAGAMIHSRIGRVVFGVRNAKTGAAGSLMDVLHYPGMNHRVEITEGILADECAALLCYFFRMPRQVFNAQKKAQSSTDGSSGSETPGTSESATPESSGSEVEFSHEYWMRHALTLAKRARDEREVPVGAVLVLNNRVIGEGWNRAIGLHDPYDVRKMIAKSEQEIGKATAKYFFYSNIMNFFKTEITLANGEIRKRPLIETNGETGEIVWDKGRDFATVRKVLSMPQVNIVKKTEVQTGGFSKESILPKRNSDKLIARKKDWDPKKYGGFDSPTVAYSVLVVAKVEKGKSKKLKSVKELLGITIMERSSFEKNPIDFLEAKGYKEVKKDLIIKLPKYSLFELENGRKRMLASAGELQKGNELALPSKYVNFLYLASHYEKLKGSPEDNEQKQLFVEQHKHYLDEIIEQISEFSKRVILADANLDKVLSAYNKHRDKPIREQAENIIHLFTLTNLGAPAAFKYFDTTIDRKRYTSTKEVLDATLIHQSITGLYETRIDLSQLGGD

SEQ ID NO: 304 - protein, 1554 aa, synthetic construct
  REGION 1..1554: note = 128 TadA CP65ins 1022 polypeptide sequence
MDKKYSIGLAIGTNSVGWAVITDEYKVPSKKFKVLGNTDRHSIKKNLIGALLFDSGETAEATRLKRTARRRYTRRKNRICYLQEIFSNEMAKVDDSFFHRLEESFLVEEDKKHERHPIFGNIVDEVAYHEKYPTIYHLRKKLVDSTDKADLRLIYLALAHMIKFRGHFLIEGDLNPDNSDVDKLFIQLVQTYNQLFEENPINASGVDAKAILSARLSKSRRLENLIAQLPGEKKNGLFGNLIALSLGLTPNFKSNFDLAEDAKLQLSKDTYDDDLDNLLAQIGDQYADLFLAAKNLSDAILLSDILRVNTEITKAPLSASMIKRYDEHHQDLTLLKALVRQQLPEKYKEIFFDQSKNGYAGYIDGGASQEEFYKFIKPILEKMDGTEELLVKLNREDLLRKQRTFDNGSIPHQIHLGELHAILRRQEDFYPFLKDNREKIEKILTFRIPYYVGPLARGNSRFAWMTRKSEETITPWNFEEVVDKGASAQSFIERMTNFDKNLPNEKVLPKHSLLYEYFTVYNELTKVKYVTEGMRKPAFLSGEQKKAIVDLLFKTNRKVTVKQLKEDYFKKIECFDSVEISGVEDRFNASLGTYHDLLKIIKDKDFLDNEENEDILEDIVLTLTLFEDREMIEERLKTYAHLFDDKVMKQLKRRRYTGWGRLSRKLINGIRDKQSGKTILDFLKSDGFANRNFMQLIHDDSLTFKEDIQKAQVSGQGDSLHEHIANLAGSPAIKKGILQTVKVVDELVKVMGRHKPENIVIEMARENQTTQKGQKNSRERMKRIEEGIKELGSQILKEHPVENTQLQNEKLYLYYLQNGRDMYVDQELDINRLSDYDVDHIVPQSFLKDDSIDNKVLTRSDKNRGKSDNVPSEEVVKKMKNYWRQLLNAKLITQRKFDNLTKAERGGLSELDKAGFIKRQLVETRQITKHVAQILDSRMNTKYDENDKLIREVKVITLKSKLVSDFRKDFQFYKVREINNYHHAHDAYLNAVVGTALIKKYPKLESEFVYGDYKVYDVRKMITAHAEIMALRQGGLVMQNYRLIDATLYVTFEPCVMCAGAMIHSRIGRVVFGVRNAKTGAAGSLMDVLHYPGMNHRVEITEGILADECAALLCYFFRMPRQVFNAQKKAQSSTDGSSGSETPGTSESATPESSGSEVEFSHEYWMRHALTLAKRARDEREVPVGAVLVLNNRVIGEGWNRAIGLHDPAKSEQEIGKATAKYFFYSNIMNFFKTEITLANGEIRKRPLIETNGETGEIVWDKGRDFATVRKVLSMPQVNIVKKTEVQTGGFSKESILPKRNSDKLIARKKDWDPKKYGGFDSPTVAYSVLVVAKVEKGKSKKLKSVKELLGITIMERSSFEKNPIDFLEAKGYKEVKKDLIIKLPKYSLFELENGRKRMLASAGELQKGNELALPSKYVNFLYLASHYEKLKGSPEDNEQKQLFVEQHKHYLDEIIEQISEFSKRVILADANLDKVLSAYNKHRDKPIREQAENIIHLFTLTNLGAPAAFKYFDTTIDRKRYTSTKEVLDATLIHQSITGLYETRIDLSQLGGD

SEQ ID NO: 305 - protein, 1554 aa, synthetic construct
  REGION 1..1554: note = 129 TadA CP65ins 1029 polypeptide sequence
MDKKYSIGLAIGTNSVGWAVITDEYKVPSKKFKVLGNTDRHSIKKNLIGALLFDSGETAEATRLKRTARRRYTRRKNRICYLQEIFSNEMAKVDDSFFHRLEESFLVEEDKKHERHPIFGNIVDEVAYHEKYPTIYHLRKKLVDSTDKADLRLIYLALAHMIKFRGHFLIEGDLNPDNSDVDKLFIQLVQTYNQLFEENPINASGVDAKAILSARLSKSRRLENLIAQLPGEKKNGLFGNLIALSLGLTPNFKSNFDLAEDAKLQLSKDTYDDDLDNLLAQIGDQYADLFLAAKNLSDAILLSDILRVNTEITKAPLSASMIKRYDEHHQDLTLLKALVRQQLPEKYKEIFFDQSKNGYAGYIDGGASQEEFYKFIKPILEKMDGTEELLVKLNREDLLRKQRTFDNGSIPHQIHLGELHAILRRQEDFYPFLKDNREKIEKILTFRIPYYVGPLARGNSRFAWMTRKSEETITPWNFEEVVDKGASAQSFIERMTNFDKNLPNEKVLPKHSLLYEYFTVYNELTKVKYVTEGMRKPAFLSGEQKKAIVDLLFKTNRKVTVKQLKEDYFKKIECFDSVEISGVEDRFNASLGTYHDLLKIIKDKDFLDNEENEDILEDIVLTLTLFEDREMIEERLKTYAHLFDDKVMKQLKRRRYTGWGRLSRKLINGIRDKQSGKTILDFLKSDGFANRNFMQLIHDDSLTFKEDIQKAQVSGQGDSLHEHIANLAGSPAIKKGILQTVKVVDELVKVMGRHKPENIVIEMARENQTTQKGQKNSRERMKRIEEGIKELGSQILKEHPVENTQLQNEKLYLYYLQNGRDMYVDQELDINRLSDYDVDHIVPQSFLKDDSIDNKVLTRSDKNRGKSDNVPSEEVVKKMKNYWRQLLNAKLITQRKFDNLTKAERGGLSELDKAGFIKRQLVETRQITKHVAQILDSRMNTKYDENDKLIREVKVITLKSKLVSDFRKDFQFYKVREINNYHHAHDAYLNAVVGTALIKKYPKLESEFVYGDYKVYDVRKMIAKSEQEITAHAEIMALRQGGLVMQNYRLIDATLYVTFEPCVMCAGAMIHSRIGRVVFGVRNAKTGAAGSLMDVLHYPGMNHRVEITEGILADECAALLCYFFRMPRQVFNAQKKAQSSTDGSSGSETPGTSESATPESSGSEVEFSHEYWMRHALTLAKRARDEREVPVGAVLVLNNRVIGEGWNRAIGLHDPGKATAKYFFYSNIMNFFKTEITLANGEIRKRPLIETNGETGEIVWDKGRDFATVRKVLSMPQVNIVKKTEVQTGGFSKESILPKRNSDKLIARKKDWDPKKYGGFDSPTVAYSVLVVAKVEKGKSKKLKSVKELLGITIMERSSFEKNPIDFLEAKGYKEVKKDLIIKLPKYSLFELENGRKRMLASAGELQKGNELALPSKYVNFLYLASHYEKLKGSPEDNEQKQLFVEQHKHYLDEIIEQISEFSKRVILADANLDKVLSAYNKHRDKPIREQAENIIHLFTLTNLGAPAAFKYFDTTIDRKRYTSTKEVLDATLIHQSITGLYETRIDLSQLGGD

SEQ ID NO: 306 - protein, 1554 aa, synthetic construct
  REGION 1..1554: note = 130 TadA CP65ins 1041 polypeptide sequence
MDKKYSIGLAIGTNSVGWAVITDEYKVPSKKFKVLGNTDRHSIKKNLIGALLFDSGETAEATRLKRTARRRYTRRKNRICYLQEIFSNEMAKVDDSFFHRLEESFLVEEDKKHERHPIFGNIVDEVAYHEKYPTIYHLRKKLVDSTDKADLRLIYLALAHMIKFRGHFLIEGDLNPDNSDVDKLFIQLVQTYNQLFEENPINASGVDAKAILSARLSKSRRLENLIAQLPGEKKNGLFGNLIALSLGLTPNFKSNFDLAEDAKLQLSKDTYDDDLDNLLAQIGDQYADLFLAAKNLSDAILLSDILRVNTEITKAPLSASMIKRYDEHHQDLTLLKALVRQQLPEKYKEIFFDQSKNGYAGYIDGGASQEEFYKFIKPILEKMDGTEELLVKLNREDLLRKQRTFDNGSIPHQIHLGELHAILRRQEDFYPFLKDNREKIEKILTFRIPYYVGPLARGNSRFAWMTRKSEETITPWNFEEVVDKGASAQSFIERMTNFDKNLPNEKVLPKHSLLYEYFTVYNELTKVKYVTEGMRKPAFLSGEQKKAIVDLLFKTNRKVTVKQLKEDYFKKIECFDSVEISGVEDRFNASLGTYHDLLKIIKDKDFLDNEENEDILEDIVLTLTLFEDREMIEERLKTYAHLFDDKVMKQLKRRRYTGWGRLSRKLINGIRDKQSGKTILDFLKSDGFANRNFMQLIHDDSLTFKEDIQKAQVSGQGDSLHEHIANLAGSPAIKKGILQTVKVVDELVKVMGRHKPENIVIEMARENQTTQKGQKNSRERMKRIEEGIKELGSQILKEHPVENTQLQNEKLYLYYLQNGRDMYVDQELDINRLSDYDVDHIVPQSFLKDDSIDNKVLTRSDKNRGKSDNVPSEEVVKKMKNYWRQLLNAKLITQRKFDNLTKAERGGLSELDKAGFIKRQLVETRQITKHVAQILDSRMNTKYDENDKLIREVKVITLKSKLVSDFRKDFQFYKVREINNYHHAHDAYLNAVVGTALIKKYPKLESEFVYGDYKVYDVRKMIAKSEQEIGKATAKYFFYSTAHAEIMALRQGGLVMQNYRLIDATLYVTFEPCVMCAGAMIHSRIGRVVFGVRNAKTGAAGSLMDVLHYPGMNHRVEITEGILADECAALLCYFFRMPRQVFNAQKKAQSSTDGSSGSETPGTSESATPESSGSEVEFSHEYWMRHALTLAKRARDEREVPVGAVLVLNNRVIGEGWNRAIGLHDPNIMNFFKTEITLANGEIRKRPLIETNGETGEIVWDKGRDFATVRKVLSMPQVNIVKKTEVQTGGFSKESILPKRNSDKLIARKKDWDPKKYGGFDSPTVAYSVLVVAKVEKGKSKKLKSVKELLGITIMERSSFEKNPIDFLEAKGYKEVKKDLIIKLPKYSLFELENGRKRMLASAGELQKGNELALPSKYVNFLYLASHYEKLKGSPEDNEQKQLFVEQHKHYLDEIIEQISEFSKRVILADANLDKVLSAYNKHRDKPIREQAENIIHLFTLTNLGAPAAFKYFDTTIDRKRYTSTKEVLDATLIHQSITGLYETRIDLSQLGGD

SEQ ID NO: 307 - protein, 1554 aa, synthetic construct
  REGION 1..1554: note = 131 TadA CP65ins 1054 polypeptide sequence
MDKKYSIGLAIGTNSVGWAVITDEYKVPSKKFKVLGNTDRHSIKKNLIGALLFDSGETAEATRLKRTARRRYTRRKNRICYLQEIFSNEMAKVDDSFFHRLEESFLVEEDKKHERHPIFGNIVDEVAYHEKYPTIYHLRKKLVDSTDKADLRLIYLALAHMIKFRGHFLIEGDLNPDNSDVDKLFIQLVQTYNQLFEENPINASGVDAKAILSARLSKSRRLENLIAQLPGEKKNGLFGNLIALSLGLTPNFKSNFDLAEDAKLQLSKDTYDDDLDNLLAQIGDQYADLFLAAKNLSDAILLSDILRVNTEITKAPLSASMIKRYDEHHQDLTLLKALVRQQLPEKYKEIFFDQSKNGYAGYIDGGASQEEFYKFIKPILEKMDGTEELLVKLNREDLLRKQRTFDNGSIPHQIHLGELHAILRRQEDFYPFLKDNREKIEKILTFRIPYYVGPLARGNSRFAWMTRKSEETITPWNFEEVVDKGASAQSFIERMTNFDKNLPNEKVLPKHSLLYEYFTVYNELTKVKYVTEGMRKPAFLSGEQKKAIVDLLFKTNRKVTVKQLKEDYFKKIECFDSVEISGVEDRFNASLGTYHDLLKIIKDKDFLDNEENEDILEDIVLTLTLFEDREMIEERLKTYAHLFDDKVMKQLKRRRYTGWGRLSRKLINGIRDKQSGKTILDFLKSDGFANRNFMQLIHDDSLTFKEDIQKAQVSGQGDSLHEHIANLAGSPAIKKGILQTVKVVDELVKVMGRHKPENIVIEMARENQTTQKGQKNSRERMKRIEEGIKELGSQILKEHPVENTQLQNEKLYLYYLQNGRDMYVDQELDINRLSDYDVDHIVPQSFLKDDSIDNKVLTRSDKNRGKSDNVPSEEVVKKMKNYWRQLLNAKLITQRKFDNLTKAERGGLSELDKAGFIKRQLVETRQITKHVAQILDSRMNTKYDENDKLIREVKVITLKSKLVSDFRKDFQFYKVREINNYHHAHDAYLNAVVGTALIKKYPKLESEFVYGDYKVYDVRKMIAKSEQEIGKATAKYFFYSNIMNFFKTEITLANTAHAEIMALRQGGLVMQNYRLIDATLYVTFEPCVMCAGAMIHSRIGRVVFGVRNAKTGAAGSLMDVLHYPGMNHRVEITEGILADECAALLCYFFRMPRQVFNAQKKAQSSTDGSSGSETPGTSESATPESSGSEVEFSHEYWMRHALTLAKRARDEREVPVGAVLVLNNRVIGEGWNRAIGLHDPGEIRKRPLIETNGETGEIVWDKGRDFATVRKVLSMPQVNIVKKTEVQTGGFSKESILPKRNSDKLIARKKDWDPKKYGGFDSPTVAYSVLVVAKVEKGKSKKLKSVKELLGITIMERSSFEKNPIDFLEAKGYKEVKKDLIIKLPKYSLFELENGRKRMLASAGELQKGNELALPSKYVNFLYLASHYEKLKGSPEDNEQKQLFVEQHKHYLDEIIEQISEFSKRVILADANLDKVLSAYNKHRDKPIREQAENIIHLFTLTNLGAPAAFKYFDTTIDRKRYTSTKEVLDATLIHQSITGLYETRIDLSQLGGD

SEQ ID NO: 308 - protein, 1554 aa, synthetic construct
  REGION 1..1554: note = 132 TadA CP65ins 1246 polypeptide sequence
MDKKYSIGLAIGTNSVGWAVITDEYKVPSKKFKVLGNTDRHSIKKNLIGALLFDSGETAEATRLKRTARRRYTRRKNRICYLQEIFSNEMAKVDDSFFHRLEESFLVEEDKKHERHPIFGNIVDEVAYHEKYPTIYHLRKKLVDSTDKADLRLIYLALAHMIKFRGHFLIEGDLNPDNSDVDKLFIQLVQTYNQLFEENPINASGVDAKAILSARLSKSRRLENLIAQLPGEKKNGLFGNLIALSLGLTPNFKSNFDLAEDAKLQLSKDTYDDDLDNLLAQIGDQYADLFLAAKNLSDAILLSDILRVNTEITKAPLSASMIKRYDEHHQDLTLLKALVRQQLPEKYKEIFFDQSKNGYAGYIDGGASQEEFYKFIKPILEKMDGTEELLVKLNREDLLRKQRTFDNGSIPHQIHLGELHAILRRQEDFYPFLKDNREKIEKILTFRIPYYVGPLARGNSRFAWMTRKSEETITPWNFEEVVDKGASAQSFIERMTNFDKNLPNEKVLPKHSLLYEYFTVYNELTKVKYVTEGMRKPAFLSGEQKKAIVDLLFKTNRKVTVKQLKEDYFKKIECFDSVEISGVEDRFNASLGTYHDLLKIIKDKDFLDNEENEDILEDIVLTLTLFEDREMIEERLKTYAHLFDDKVMKQLKRRRYTGWGRLSRKLINGIRDKQSGKTILDFLKSDGFANRNFMQLIHDDSLTFKEDIQKAQVSGQGDSLHEHIANLAGSPAIKKGILQTVKVVDELVKVMGRHKPENIVIEMARENQTTQKGQKNSRERMKRIEEGIKELGSQILKEHPVENTQLQNEKLYLYYLQNGRDMYVDQELDINRLSDYDVDHIVPQSFLKDDSIDNKVLTRSDKNRGKSDNVPSEEVVKKMKNYWRQLLNAKLITQRKFDNLTKAERGGLSELDKAGFIKRQLVETRQITKHVAQILDSRMNTKYDENDKLIREVKVITLKSKLVSDFRKDFQFYKVREINNYHHAHDAYLNAVVGTALIKKYPKLESEFVYGDYKVYDVRKMIAKSEQEIGKATAKYFFYSNIMNFFKTEITLANGEIRKRPLIETNGETGEIVWDKGRDFATVRKVLSMPQVNIVKKTEVQTGGFSKESILPKRNSDKLIARKKDWDPKKYGGFDSPTVAYSVLVVAKVEKGKSKKLKSVKELLGITIMERSSFEKNPIDFLEAKGYKEVKKDLIIKLPKYSLFELENGRKRMLASAGELQKGNELALPSKYVNFLYLASHYEKLKGTAHAEIMALRQGGLVMQNYRLIDATLYVTFEPCVMCAGAMIHSRIGRVVFGVRNAKTGAAGSLMDVLHYPGMNHRVEITEGILADECAALLCYFFRMPRQVFNAQKKAQSSTDGSSGSETPGTSESATPESSGSEVEFSHEYWMRHALTLAKRARDEREVPVGAVLVLNNRVIGEGWNRAIGLHDPSPEDNEQKQLFVEQHKHYLDEIIEQISEFSKRVILADANLDKVLSAYNKHRDKPIREQAENIIHLFTLTNLGAPAAFKYFDTTIDRKRYTSTKEVLDATLIHQSITGLYETRIDLSQLGGD

SEQ ID NO: 309 - protein, 160 aa, Staphylococcus aureus
  REGION 1..160: note = MISC_FEATURE - TadA polypeptide sequence
MGSHMTNDIYFMTLAIEEAKKAAQLGEVPIGAIITKDDEVIARAHNLRETLQQPTAHAEHIAIERAAKVLGSWRLEGCTLYVTLEPCVMCAGTIVMSRIPRVVYGADDPKGGCSGSLMNLLQQSNFNHRAIVDKGVLKEACSTLLTTFFKNLRANKKSTN

SEQ ID NO: 310 - protein, 161 aa, Bacillus subtilis
  REGION 1..161: note = MISC_FEATURE - TadA polypeptide sequence
MTQDELYMKEAIKEAKKAEEKGEVPIGAVLVINGEIIARAHNLRETEQRSIAHAEMLVIDEACKALGTWRLEGATLYVTLEPCPMCAGAVVLSRVEKVVFGAFDPKGGCSGTLMNLLQEERFNHQAEVVSGVLEEECGGMLSAFFRELRKKKKAARKNLSE

SEQ ID NO: 311 - protein, 183 aa, Salmonella enterica
  REGION 1..183: note = MISC_FEATURE - TadA polypeptide sequence
  source 1..183: note = serovar Typhimurium
MPPAFITGVTSLSDVELDHEYWMRHALTLAKRAWDEREVPVGAVLVHNHRVIGEGWNRPIGRHDPTAHAEIMALRQGGLVLQNYRLLDTTLYVTLEPCVMCAGAMVHSRIGRVVFGARDAKTGAAGSLIDVLHHPGMNHRVEIIEGVLRDECATLLSDFFRMRRQEIKALKKADRAEGAGPAV

SEQ ID NO: 312 - protein, 164 aa, Shewanella putrefaciens
  REGION 1..164: note = MISC_FEATURE - TadA polypeptide sequence
MDEYWMQVAMQMAEKAEAAGEVPVGAVLVKDGQQIATGYNLSISQHDPTAHAEILCLRSAGKKLENYRLLDATLYITLEPCAMCAGAMVHSRIARVVYGARDEKTGAAGTVVNLLQHPAFNHQVEVTSGVLAEACSAQLSRFFKRRRDEKKALKLAQRAQQGIE

SEQ ID NO: 313 - protein, 173 aa, Haemophilus influenzae
  REGION 1..173: note = MISC_FEATURE - TadA polypeptide sequence
MDAAKVRSEFDEKMMRYALELADKAEALGEIPVGAVLVDDARNIIGEGWNLSIVQSDPTAHAEIIALRNGAKNIQNYRLLNSTLYVTLEPCTMCAGAILHSRIKRLVFGASDYKTGAIGSRFHFFDDYKMNHTLEITSGVLAEECSQKLSTFFQKRREEKKIEKALLKSLSDK

SEQ ID NO: 314 - protein, 161 aa, Caulobacter crescentus
  REGION 1..161: note = MISC_FEATURE - TadA polypeptide sequence
MRTDESEDQDHRMMRLALDAARAAAEAGETPVGAVILDPSTGEVIATAGNGPIAAHDPTAHAEIAAMRAAAAKLGNYRLTDLTLVVTLEPCAMCAGAISHARIGRVVFGADDPKGGAVVHGPKFFAQPTCHWRPEVTGGVLADESADLLRGFFRARRKAKI

SEQ ID NO: 315 - protein, 179 aa, Geobacter sulfurreducens
  REGION 1..179: note = MISC_FEATURE - TadA polypeptide sequence
MSSLKKTPIRDDAYWMGKAIREAAKAAARDEVPIGAVIVRDGAVIGRGHNLREGSNDPSAHAEMIAIRQAARRSANWRLTGATLYVTLEPCLMCMGAIILARLERVVFGCYDPKGGAAGSLYDLSADPRLNHQVRLSPGVCQEECGTMLSDFFRDLRRRKKAKATPALFIDERKVPPEP

SEQ ID NO: 316 - protein, 167 aa, synthetic construct
  REGION 1..167: note = TadA*8 polypeptide sequence
MSEVEFSHEYWMRHALTLAKRARDEREVPVGAVLVLNNRVIGEGWNRAIGLHDPTAHAEIMALRQGGLVMQNYRLIDATLYVTFEPCVMCAGAMIHSRIGRVVFGVRNAKTGAAGSLMDVLHYPGMNHRVEITEGILADECAALLCTFFRMPRQVFNAQKKAQSSTD

SEQ ID NO: 317 - RNA, 80 nt, synthetic construct
  misc_feature 1..80: note = gRNA scaffold polynucleotide sequence
  source 1..80: mol_type = other RNA
gttttagagctagaaatagcaagttaaaataaggctagtccgttatcaacttgaaaaagtggcaccgagtcggtgctttt

SEQ ID NO: 318 - RNA, 125 nt, synthetic construct
  misc_feature 1..125: note = gRNA scaffold polynucleotide sequence
  source 1..125: mol_type = other RNA
gtttttgtactctcaagatttaagtaactgtacaacgaaacttacacagttacttaaatcttgcagaagctacaaagataaggcttcatgccgaaatcaacaccctgtcattttatggcagggtg

SEQ ID NO: 319 - RNA, 76 nt, Streptococcus pyogenes
  misc_feature 1..76: note = S. pyogenes gRNA scaffold oligonucleotide sequence
  source 1..76: mol_type = other RNA
gttttagagctagaaatagcaagttaaaataaggctagtccgttatcaacttgaaaaagtggcaccgagtcggtgc

SEQ ID NO: 320 - RNA, 84 nt, Staphylococcus aureus
  misc_feature 1..84: note = S. aureus gRNA scaffold oligonucleotide sequence
  source 1..84: mol_type = other RNA
gttttagtactctgtaatgaaaattacagaatctactaaaacaaggcaaaatgccgtgtttatctcgtcaacttgttggcgaga

SEQ ID NO: 321 - RNA, 97 nt, Bacillus hisashii
  misc_feature 1..97: note = BhCas12b gRNA scaffold oligonucleotide sequence
  source 1..97: mol_type = other RNA
gttctgtcttttggtcaggacaaccgtctagctataagtgctgcagggtgtgagaaactcctattgctggacgatgtctcttacgaggcattagcac

SEQ ID NO: 322 - RNA, 88 nt, Bacillus sp.
  misc_feature 1..88: note = BvCas12b gRNA scaffold oligonucleotide sequence
  source 1..88: mol_type = other RNA
gacctatagggtcaatgaatctgtgcgtgtgccataagtaattaaaaattacccaccacaggagcacctgaaaacaggtgcttggcac

SEQ ID NO: 323 - RNA, 80 nt, synthetic construct
  misc_feature 1..80: note = gRNA scaffold nucleotide sequence; oligonucleotide sequence
  modified_base 78..80: mod_base = um
  misc_feature 78..80: note = In embodiments, a nucleotide(s) is linked to the preceding 5' nucleotide by a 3' phosphorothioate internucleotide linkage
  source 1..80: mol_type = other RNA
gttttagagctagaaatagcaagttaaaataaggctagtccgttatcaacttgaaaaagtgggaccgagtcggtgctttt

SEQ ID NO: 324 - RNA, 80 nt, synthetic construct; identical to SEQ ID NO: 317
  misc_feature 1..80: note = gRNA scaffold nucleotide sequence
  misc_feature 78..80: note = In embodiments, a nucleotide(s) is linked to the preceding 5' nucleotide by a 3' phosphorothioate internucleotide linkage
  modified_base 78..80: mod_base = um
  source 1..80: mol_type = other RNA

SEQ ID NO: 325 - RNA, 117 nt, Bacillus hisashii
  misc_feature 1..117: note = BhCas12b gRNA scaffold + guide sequence; oligonucleotide sequence
  misc_feature 1..97: note = BhCas12b sgRNA scaffold
  source 1..117: mol_type = other RNA
gttctgtcttttggtcaggacaaccgtctagctataagtgctgcagggtgtgagaaactcctattgctggacgatgtctcttacgaggcattagcacnnnnnnnnnnnnnnnnnnnn

SEQ ID NO: 326 - RNA, 108 nt, Bacillus sp.
  misc_feature 1..108: note = BvCas12b gRNA scaffold + guide sequence; oligonucleotide sequence
  misc_feature 1..88: note = BvCas12b gRNA scaffold
  source 1..108: mol_type = other RNA
gacctatagggtcaatgaatctgtgcgtgtgccataagtaattaaaaattacccaccacaggagcacctgaaaacaggtgcttggcacnnnnnnnnnnnnnnnnnnnn

SEQ ID NO: 327 - RNA, 119 nt, Alicyclobacillus acidiphilus
  misc_feature 1..119: note = AaCas12b gRNA scaffold + guide sequence; oligonucleotide sequence
  misc_feature 1..99: note = AaCas12b gRNA scaffold
  source 1..119: mol_type = other RNA
gtctaaaggacagaatttttcaacgggtgtgccaatggccactttccaggtggcaaagcccgttgaacttctcaaaaagaacgatctgagaagtggcacnnnnnnnnnnnnnnnnnnnn

SEQ ID NO: 328 - protein, 29 aa, synthetic construct
  REGION 1..29: note = synthetic polypeptide sequence
PKKKRKVEGADKRTADGSEFESPKKKRKV

SEQ ID NO: 329 - protein, 23 aa, synthetic construct
  REGION 1..23: note = synthetic peptide sequence
RKSGKIAAIVVKRPRKPKKKRKV

SEQ ID NO: 330 - protein, 8 aa, synthetic construct
  REGION 1..8: note = synthetic peptide sequence
SGGSSGGS

SEQ ID NO: 331 - protein, 1609 aa, synthetic construct
  REGION 1..1609: note = pNMG-B335ABE8.1_Y147T_CP5_NGC PAM_monomer polypeptide sequence
MSEVEFSHEYWMRHALTLAKRARDEREVPVGAVLVLNNRVIGEGWNRAIGLHDPTAHAEIMALRQGGLVMQNYRLIDATLYVTFEPCVMCAGAMIHSRIGRVVFGVRNAKTGAAGSLMDVLHYPGMNHRVEITEGILADECAALLCTFFRMPRQVFNAQKKAQSSTDSGGSSGGSSGSETPGTSESATPESSGGSSGGSEIGKATAKYFFYSNIMNFFKTEITLANGEIRKRPLIETNGETGEIVWDKGRDFATVRKVLSMPQVNIVKKTEVQTGGFSKESILPKRNSDKLIARKKDWDPKKYGGFMQPTVAYSVLVVAKVEKGKSKKLKSVKELLGITIMERSSFEKNPIDFLEAKGYKEVKKDLIIKLPKYSLFELENGRKRMLASAKFLQKGNELALPSKYVNFLYLASHYEKLKGSPEDNEQKQLFVEQHKHYLDEIIEQISEFSKRVILADANLDKVLSAYNKHRDKPIREQAENIIHLFTLTNLGAPRAFKYFDTTIARKEYRSTKEVLDATLIHQSITGLYETRIDLSQLGGDGGSGGSGGSGGSGGSGGSGGMDKKYSIGLAIGTNSVGWAVITDEYKVPSKKFKVLGNTDRHSIKKNLIGALLFDSGETAEATRLKRTARRRYTRRKNRICYLQEIFSNEMAKVDDSFFHRLEESFLVEEDKKHERHPIFGNIVDEVAYHEKYPTIYHLRKKLVDSTDKADLRLIYLALAHMIKFRGHFLIEGDLNPDNSDVDKLFIQLVQTYNQLFEENPINASGVDAKAILSARLSKSRRLENLIAQLPGEKKNGLFGNLIALSLGLTPNFKSNFDLAEDAKLQLSKDTYDDDLDNLLAQIGDQYADLFLAAKNLSDAILLSDILRVNTEITKAPLSASMIKRYDEHHQDLTLLKALVRQQLPEKYKEIFFDQSKNGYAGYIDGGASQEEFYKFIKPILEKMDGTEELLVKLNREDLLRKQRTFDNGSIPHQIHLGELHAILRRQEDFYPFLKDNREKIEKILTFRIPYYVGPLARGNSRFAWMTRKSEETITPWNFEEVVDKGASAQSFIERMTNFDKNLPNEKVLPKHSLLYEYFTVYNELTKVKYVTEGMRKPAFLSGEQKKAIVDLLFKTNRKVTVKQLKEDYFKKIECFDSVEISGVEDRFNASLGTYHDLLKIIKDKDFLDNEENEDILEDIVLTLTLFEDREMIEERLKTYAHLFDDKVMKQLKRRRYTGWGRLSRKLINGIRDKQSGKTILDFLKSDGFANRNFMQLIHDDSLTFKEDIQKAQVSGQGDSLHEHIANLAGSPAIKKGILQTVKVVDELVKVMGRHKPENIVIEMARENQTTQKGQKNSRERMKRIEEGIKELGSQILKEHPVENTQLQNEKLYLYYLQNGRDMYVDQELDINRLSDYDVDHIVPQSFLKDDSIDNKVLTRSDKNRGKSDNVPSEEVVKKMKNYWRQLLNAKLITQRKFDNLTKAERGGLSELDKAGFIKRQLVETRQITKHVAQILDSRMNTKYDENDKLIREVKVITLKSKLVSDFRKDFQFYKVREINNYHHAHDAYLNAVVGTALIKKYPKLESEFVYGDYKVYDVRKMIAKSEQEGADKRTADGSEFESPKKKRKV

SEQ ID NO: 332 - protein, 1807 aa, synthetic construct
  REGION 1..1807: note = pNMG-357_ABE8.14 with NGC PAMCP5 polypeptide sequence
  REGION 1..174: note = MISC_FEATURE - Adenosine deaminase sequence
  REGION 175..198: note = MISC_FEATURE - Linker sequence
  REGION 199..365: note = MISC_FEATURE - Adenosine deaminase sequence
  REGION 366..397: note = MISC_FEATURE - Linker sequence
  REGION 398..738: note = MISC_FEATURE - Sequence derived from Cas9
  REGION 739..759: note = MISC_FEATURE - Linker sequence
  REGION 760..1785: note = MISC_FEATURE - Sequence derived from Cas9
  REGION 1786..1807: note = MISC_FEATURE - Bipartite nuclear localization sequence
MSEVEFSHEYWMRHALTLAKRAWDEREVPVGAVLVHNNRVIGEGWNRPIGRHDPTAHAEIMALRQGGLVMQNYRLIDATLYVTLEPCVMCAGAMIHSRIGRVVFGARDAKTGAAGSLMDVLHHPGMNHRVEITEGILADECAALLSDFFRMRRQEIKAQKKAQSSTDGGSSGGSSGSETPGTSESATPESSGGSSGGSMSEVEFSHEYWMRHALTLAKRARDEREVPVGAVLVLNNRVIGEGWNRAIGLHDPTAHAEIMALRQGGLVMQNYRLIDATLYVTFEPCVMCAGAMIHSRIGRVVFGVRNAKTGAAGSLMDVLHYPGMNHRVEITEGILADECAALLCTFFRMPRQVFNAQKKAQSSTDSGGSSGGSSGSETPGTSESATPESSGGSSGGSEIGKATAKYFFYSNIMNFFKTEITLANGEIRKRPLIETNGETGEIVWDKGRDFATVRKVLSMPQVNIVKKTEVQTGGFSKESILPKRNSDKLIARKKDWDPKKYGGFMQPTVAYSVLVVAKVEKGKSKKLKSVKELLGITIMERSSFEKNPIDFLEAKGYKEVKKDLIIKLPKYSLFELENGRKRMLASAKFLQKGNELALPSKYVNFLYLASHYEKLKGSPEDNEQKQLFVEQHKHYLDEIIEQISEFSKRVILADANLDKVLSAYNKHRDKPIREQAENIIHLFTLTNLGAPRAFKYFDTTIARKEYRSTKEVLDATLIHQSITGLYETRIDLSQLGGDGGSGGSGGSGGSGGSGGSGGMDKKYSIGLAIGTNSVGWAVITDEYKVPSKKFKVLGNTDRHSIKKNLIGALLFDSGETAEATRLKRTARRRYTRRKNRICYLQEIFSNEMAKVDDSFFHRLEESFLVEEDKKHERHPIFGNIVDEVAYHEKYPTIYHLRKKLVDSTDKADLRLIYLALAHMIKFRGHFLIEGDLNPDNSDVDKLFIQLVQTYNQLFEENPINASGVDAKAILSARLSKSRRLENLIAQLPGEKKNGLFGNLIALSLGLTPNFKSNFDLAEDAKLQLSKDTYDDDLDNLLAQIGDQYADLFLAAKNLSDAILLSDILRVNTEITKAPLSASMIKRYDEHHQDLTLLKALVRQQLPEKYKEIFFDQSKNGYAGYIDGGASQEEFYKFIKPILEKMDGTEELLVKLNREDLLRKQRTFDNGSIPHQIHLGELHAILRRQEDFYPFLKDNREKIEKILTFRIPYYVGPLARGNSRFAWMTRKSEETITPWNFEEVVDKGASAQSFIERMTNFDKNLPNEKVLPKHSLLYEYFTVYNELTKVKYVTEGMRKPAFLSGEQKKAIVDLLFKTNRKVTVKQLKEDYFKKIECFDSVEISGVEDRFNASLGTYHDLLKIIKDKDFLDNEENEDILEDIVLTLTLFEDREMIEERLKTYAHLFDDKVMKQLKRRRYTGWGRLSRKLINGIRDKQSGKTILDFLKSDGFANRNFMQLIHDDSLTFKEDIQKAQVSGQGDSLHEHIANLAGSPAIKKGILQTVKVVDELVKVMGRHKPENIVIEMARENQTTQKGQKNSRERMKRIEEGIKELGSQILKEHPVENTQLQNEKLYLYYLQNGRDMYVDQELDINRLSDYDVDHIVPQSFLKDDSIDNKVLTRSDKNRGKSDNVPSEEVVKKMKNYWRQLLNAKLITQRKFDNLTKAERGGLSELDKAGFIKRQLVETRQITKHVAQILDSRMNTKYDENDKLIREVKVITLKSKLVSDFRKDFQFYKVREINNYHHAHDAYLNAVVGTALIKKYPKLESEFVYGDYKVYDVRKMIAKSEQEGADKRTADGSEFESPKKKRKV

SEQ ID NO: 333 - protein, 1588 aa, synthetic construct
  REGION 1..1588: note = ABE8.8-m polypeptide sequence
  REGION 1..167: note = MISC_FEATURE - Adenosine deaminase sequence
  REGION 168..199: note = MISC_FEATURE - Linker sequence
  REGION 200..1566: note = MISC_FEATURE - Sequence derived from Cas9
  REGION 1567..1588: note = MISC_FEATURE - Bipartite nuclear localization sequence
MSEVEFSHEYWMRHALTLAKRARDEREVPVGAVLVLNNRVIGEGWNRAIGLHDPTAHAEIMALRQGGLVMQNYRLIDATLYVTFEPCVMCAGAMIHSRIGRVVFGVRNAKTGAAGSLMDVLHHPGMNHRVEITEGILADECAALLCRFFRMPRRVFNAQKKAQSSTDSGGSSGGSSGSETPGTSESATPESSGGSSGGSDKKYSIGLAIGTNSVGWAVITDEYKVPSKKFKVLGNTDRHSIKKNLIGALLFDSGETAEATRLKRTARRRYTRRKNRICYLQEIFSNEMAKVDDSFFHRLEESFLVEEDKKHERHPIFGNIVDEVAYHEKYPTIYHLRKKLVDSTDKADLRLIYLALAHMIKFRGHFLIEGDLNPDNSDVDKLFIQLVQTYNQLFEENPINASGVDAKAILSARLSKSRRLENLIAQLPGEKKNGLFGNLIALSLGLTPNFKSNFDLAEDAKLQLSKDTYDDDLDNLLAQIGDQYADLFLAAKNLSDAILLSDILRVNTEITKAPLSASMIKRYDEHHQDLTLLKALVRQQLPEKYKEIFFDQSKNGYAGYIDGGASQEEFYKFIKPILEKMDGTEELLVKLNREDLLRKQRTFDNGSIPHQIHLGELHAILRRQEDFYPFLKDNREKIEKILTFRIPYYVGPLARGNSRFAWMTRKSEETITPWNFEEVVDKGASAQSFIERMTNFDKNLPNEKVLPKHSLLYEYFTVYNELTKVKYVTEGMRKPAFLSGEQKKAIVDLLFKTNRKVTVKQLKEDYFKKIECFDSVEISGVEDRFNASLGTYHDLLKIIKDKDFLDNEENEDILEDIVLTLTLFEDREMIEERLKTYAHLFDDKVMKQLKRRRYTGWGRLSRKLINGIRDKQSGKTILDFLKSDGFANRNFMQLIHDDSLTFKEDIQKAQVSGQGDSLHEHIANLAGSPAIKKGILQTVKVVDELVKVMGRHKPENIVIEMARENQTTQKGQKNSRERMKRIEEGIKELGSQILKEHPVENTQLQNEKLYLYYLQNGRDMYVDQELDINRLSDYDVDHIVPQSFLKDDSIDNKVLTRSDKNRGKSDNVPSEEVVKKMKNYWRQLLNAKLITQRKFDNLTKAERGGLSELDKAGFIKRQLVETRQITKHVAQILDSRMNTKYDENDKLIREVKVITLKSKLVSDFRKDFQFYKVREINNYHHAHDAYLNAVVGTALIKKYPKLESEFVYGDYKVYDVRKMIAKSEQEIGKATAKYFFYSNIMNFFKTEITLANGEIRKRPLIETNGETGEIVWDKGRDFATVRKVLSMPQVNIVKKTEVQTGGFSKESILPKRNSDKLIARKKDWDPKKYGGFDSPTVAYSVLVVAKVEKGKSKKLKSVKELLGITIMERSSFEKNPIDFLEAKGYKEVKKDLIIKLPKYSLFELENGRKRMLASAGELQKGNELALPSKYVNFLYLASHYEKLKGSPEDNEQKQLFVEQHKHYLDEIIEQISEFSKRVILADANLDKVLSAYNKHRDKPIREQAENIIHLFTLTNLGAPAAFKYFDTTIDRKRYTSTKEVLDATLIHQSITGLYETRIDLSQLGGDEGADKRTADGSEFESPKKKRKV

SEQ ID NO: 334 - protein, 1786 aa, synthetic construct
  REGION 1..1786: note = ABE8.8-d polypeptide sequence
  REGION 1..167: note = MISC_FEATURE - Adenosine deaminase sequence
  REGION 168..199: note = MISC_FEATURE - Linker sequence
  REGION 200..365: note = MISC_FEATURE - Adenosine deaminase sequence
  REGION 366..397: note = MISC_FEATURE - Linker sequence
  REGION 398..1764: note = MISC_FEATURE - Sequence derived from Cas9
  REGION 1765..1786: note = MISC_FEATURE - Bipartite nuclear localization sequence
MSEVEFSHEYWMRHALTLAKRAWDEREVPVGAVLVHNNRVIGEGWNRPIGRHDPTAHAEIMALRQGGLVMQNYRLIDATLYVTLEPCVMCAGAMIHSRIGRVVFGARDAKTGAAGSLMDVLHHPGMNHRVEITEGILADECAALLSDFFRMRRQEIKAQKKAQSSTDSGGSSGGSSGSETPGTSESATPESSGGSSGGSSEVEFSHEYWMRHALTLAKRARDEREVPVGAVLVLNNRVIGEGWNRAIGLHDPTAHAEIMALRQGGLVMQNYRLIDATLYVTFEPCVMCAGAMIHSRIGRVVFGVRNAKTGAAGSLMDVLHHPGMNHRVEITEGILADECAALLCRFFRMPRRVFNAQKKAQSSTDSGGSSGGSSGSETPGTSESATPESSGGSSGGSDKKYSIGLAIGTNSVGWAVITDEYKVPSKKFKVLGNTDRHSIKKNLIGALLFDSGETAEATRLKRTARRRYTRRKNRICYLQEIFSNEMAKVDDSFFHRLEESFLVEEDKKHERHPIFGNIVDEVAYHEKYPTIYHLRKKLVDSTDKADLRLIYLALAHMIKFRGHFLIEGDLNPDNSDVDKLFIQLVQTYNQLFEENPINASGVDAKAILSARLSKSRRLENLIAQLPGEKKNGLFGNLIALSLGLTPNFKSNFDLAEDAKLQLSKDTYDDDLDNLLAQIGDQYADLFLAAKNLSDAILLSDILRVNTEITKAPLSASMIKRYDEHHQDLTLLKALVRQQLPEKYKEIFFDQSKNGYAGYIDGGASQEEFYKFIKPILEKMDGTEELLVKLNREDLLRKQRTFDNGSIPHQIHLGELHAILRRQEDFYPFLKDNREKIEKILTFRIPYYVGPLARGNSRFAWMTRKSEETITPWNFEEVVDKGASAQSFIERMTNFDKNLPNEKVLPKHSLLYEYFTVYNELTKVKYVTEGMRKPAFLSGEQKKAIVDLLFKTNRKVTVKQLKEDYFKKIECFDSVEISGVEDRFNASLGTYHDLLKIIKDKDFLDNEENEDILEDIVLTLTLFEDREMIEERLKTYAHLFDDKVMKQLKRRRYTGWGRLSRKLINGIRDKQSGKTILDFLKSDGFANRNFMQLIHDDSLTFKEDIQKAQVSGQGDSLHEHIANLAGSPAIKKGILQTVKVVDELVKVMGRHKPENIVIEMARENQTTQKGQKNSRERMKRIEEGIKELGSQILKEHPVENTQLQNEKLYLYYLQNGRDMYVDQELDINRLSDYDVDHIVPQSFLKDDSIDNKVLTRSDKNRGKSDNVPSEEVVKKMKNYWRQLLNAKLITQRKFDNLTKAERGGLSELDKAGFIKRQLVETRQITKHVAQILDSRMNTKYDENDKLIREVKVITLKSKLVSDFRKDFQFYKVREINNYHHAHDAYLNAVVGTALIKKYPKLESEFVYGDYKVYDVRKMIAKSEQEIGKATAKYFFYSNIMNFFKTEITLANGEIRKRPLIETNGETGEIVWDKGRDFATVRKVLSMPQVNIVKKTEVQTGGFSKESILPKRNSDKLIARKKDWDPKKYGGFDSPTVAYSVLVVAKVEKGKSKKLKSVKELLGITIMERSSFEKNPIDFLEAKGYKEVKKDLIIKLPKYSLFELENGRKRMLASAGELQKGNELALPSKYVNFLYLASHYEKLKGSPEDNEQKQLFVEQHKHYLDEIIEQISEFSKRVILADANLDKVLSAYNKHRDKPIREQAENIIHLFTLTNLGAPAAFKYFDTTIDRKRYTSTKEVLDATLIHQSITGLYETRIDLSQLGGDEGADKRTADGSEFESPKKKRKV

SEQ ID NO: 335 - protein, 1588 aa, synthetic construct
  REGION 1..1588: note = ABE8.13-m polypeptide sequence
  REGION 1..167: note = MISC_FEATURE - Adenosine deaminase sequence
  REGION 168..199: note = MISC_FEATURE - Linker sequence
  REGION 200..1566: note = MISC_FEATURE - Sequence derived from Cas9
  REGION 1567..1588: note = MISC_FEATURE - Bipartite nuclear localization sequence
MSEVEFSHEYWMRHALTLAKRARDEREVPVGAVLVLNNRVIGEGWNRAIGLHDPTAHAEIMALRQGGLVMQNYRLYDATLYVTFEPCVMCAGAMIHSRIGRVVFGVRNAKTGAAGSLMDVLHHPGMNHRVEITEGILADECAALLCRFFRMPRRVFNAQKKAQSSTDSGGSSGGSSGSETPGTSESATPESSGGSSGGSDKKYSIGLAIGTNSVGWAVITDEYKVPSKKFKVLGNTDRHSIKKNLIGALLFDSGETAEATRLKRTARRRYTRRKNRICYLQEIFSNEMAKVDDSFFHRLEESFLVEEDKKHERHPIFGNIVDEVAYHEKYPTIYHLRKKLVDSTDKADLRLIYLALAHMIKFRGHFLIEGDLNPDNSDVDKLFIQLVQTYNQLFEENPINASGVDAKAILSARLSKSRRLENLIAQLPGEKKNGLFGNLIALSLGLTPNFKSNFDLAEDAKLQLSKDTYDDDLDNLLAQIGDQYADLFLAAKNLSDAILLSDILRVNTEITKAPLSASMIKRYDEHHQDLTLLKALVRQQLPEKYKEIFFDQSKNGYAGYIDGGASQEEFYKFIKPILEKMDGTEELLVKLNREDLLRKQRTFDNGSIPHQIHLGELHAILRRQEDFYPFLKDNREKIEKILTFRIPYYVGPLARGNSRFAWMTRKSEETITPWNFEEVVDKGASAQSFIERMTNFDKNLPNEKVLPKHSLLYEYFTVYNELTKVKYVTEGMRKPAFLSGEQKKAIVDLLFKTNRKVTVKQLKEDYFKKIECFDSVEISGVEDRFNASLGTYHDLLKIIKDKDFLDNEENEDILEDIVLTLTLFEDREMIEERLKTYAHLFDDKVMKQLKRRRYTGWGRLSRKLINGIRDKQSGKTILDFLKSDGFANRNFMQLIHDDSLTFKEDIQKAQVSGQGDSLHEHIANLAGSPAIKKGILQTVKVVDELVKVMGRHKPENIVIEMARENQTTQKGQKNSRERMKRIEEGIKELGSQILKEHPVENTQLQNEKLYLYYLQNGRDMYVDQELDINRLSDYDVDHIVPQSFLKDDSIDNKVLTRSDKNRGKSDNVPSEEVVKKMKNYWRQLLNAKLITQRKFDNLTKAERGGLSELDKAGFIKRQLVETRQITKHVAQILDSRMNTKYDENDKLIREVKVITLKSKLVSDFRKDFQFYKVREINNYHHAHDAYLNAVVGTALIKKYPKLESEFVYGDYKVYDVRKMIAKSEQEIGKATAKYFFYSNIMNFFKTEITLANGEIRKRPLIETNGETGEIVWDKGRDFATVRKVLSMPQVNIVKKTEVQTGGFSKESILPKRNSDKLIARKKDWDPKKYGGFDSPTVAYSVLVVAKVEKGKSKKLKSVKELLGITIMERSSFEKNPIDFLEAKGYKEVKKDLIIKLPKYSLFELENGRKRMLASAGELQKGNELALPSKYVNFLYLASHYEKLKGSPEDNEQKQLFVEQHKHYLDEIIEQISEFSKRVILADANLDKVLSAYNKHRDKPIREQAENIIHLFTLTNLGAPAAFKYFDTTIDRKRYTSTKEVLDATLIHQSITGLYETRIDLSQLGGDEGADKRTADGSEFESPKKKRKV

SEQ ID NO: 336 - protein, 1786 aa, synthetic construct
  REGION 1..1786: note = ABE8.13-d polypeptide sequence
  REGION 1..167: note = MISC_FEATURE - Adenosine deaminase sequence
  REGION 168..199: note = MISC_FEATURE - Linker sequence
  REGION 200..365: note = MISC_FEATURE - Adenosine deaminase sequence
  REGION 366..397: note = MISC_FEATURE - Linker sequence
  REGION 398..1764: note = MISC_FEATURE - Sequence derived from Cas9
  REGION 1765..1786: note = MISC_FEATURE - Bipartite nuclear localization sequence
MSEVEFSHEYWMRHALTLAKRAWDEREVPVGAVLVHNNRVIGEGWNRPIGRHDPTAHAEIMALRQGGLVMQNYRLIDATLYVTLEPCVMCAGAMIHSRIGRVVFGARDAKTGAAGSLMDVLHHPGMNHRVEITEGILADECAALLSDFFRMRRQEIKAQKKAQSSTDSGGSSGGSSGSETPGTSESATPESSGGSSGGSSEVEFSHEYWMRHALTLAKRARDEREVPVGAVLVLNNRVIGEGWNRAIGLHDPTAHAEIMALRQGGLVMQNYRLYDATLYVTFEPCVMCAGAMIHSRIGRVVFGVRNAKTGAAGSLMDVLHHPGMNHRVEITEGILADECAALLCRFFRMPRRVFNAQKKAQSSTDSGGSSGGSSGSETPGTSESATPESSGGSSGGSDKKYSIGLAIGTNSVGWAVITDEYKVPSKKFKVLGNTDRHSIKKNLIGALLFDSGETAEATRLKRTARRRYTRRKNRICYLQEIFSNEMAKVDDSFFHRLEESFLVEEDKKHERHPIFGNIVDEVAYHEKYPTIYHLRKKLVDSTDKADLRLIYLALAHMIKFRGHFLIEGDLNPDNSDVDKLFIQLVQTYNQLFEENPINASGVDAKAILSARLSKSRRLENLIAQLPGEKKNGLFGNLIALSLGLTPNFKSNFDLAEDAKLQLSKDTYDDDLDNLLAQIGDQYADLFLAAKNLSDAILLSDILRVNTEITKAPLSASMIKRYDEHHQDLTLLKALVRQQLPEKYKEIFFDQSKNGYAGYIDGGASQEEFYKFIKPILEKMDGTEELLVKLNREDLLRKQRTFDNGSIPHQIHLGELHAILRRQEDFYPFLKDNREKIEKILTFRIPYYVGPLARGNSRFAWMTRKSEETITPWNFEEVVDKGASAQSFIERMTNFDKNLPNEKVLPKHSLLYEYFTVYNELTKVKYVTEGMRKPAFLSGEQKKAIVDLLFKTNRKVTVKQLKEDYFKKIECFDSVEISGVEDRFNASLGTYHDLLKIIKDKDFLDNEENEDILEDIVLTLTLFEDREMIEERLKTYAHLFDDKVMKQLKRRRYTGWGRLSRKLINGIRDKQSGKTILDFLKSDGFANRNFMQLIHDDSLTFKEDIQKAQVSGQGDSLHEHIANLAGSPAIKKGILQTVKVVDELVKVMGRHKPENIVIEMARENQTTQKGQKNSRERMKRIEEGIKELGSQILKEHPVENTQLQNEKLYLYYLQNGRDMYVDQELDINRLSDYDVDHIVPQSFLKDDSIDNKVLTRSDKNRGKSDNVPSEEVVKKMKNYWRQLLNAKLITQRKFDNLTKAERGGLSELDKAGFIKRQLVETRQITKHVAQILDSRMNTKYDENDKLIREVKVITLKSKLVSDFRKDFQFYKVREINNYHHAHDAYLNAVVGTALIKKYPKLESEFVYGDYKVYDVRKMIAKSEQEIGKATAKYFFYSNIMNFFKTEITLANGEIRKRPLIETNGETGEIVWDKGRDFATVRKVLSMPQVNIVKKTEVQTGGFSKESILPKRNSDKLIARKKDWDPKKYGGFDSPTVAYSVLVVAKVEKGKSKKLKSVKELLGITIMERSSFEKNPIDFLEAKGYKEVKKDLIIKLPKYSLFELENGRKRMLASAGELQKGNELALPSKYVNFLYLASHYEKLKGSPEDNEQKQLFVEQHKHYLDEIIEQISEFSKRVILADANLDKVLSAYNKHRDKPIREQAENIIHLFTLTNLGAPAAFKYFDTTIDRKRYTSTKEVLDATLIHQSITGLYETRIDLSQLGGDEGADKRTADGSEFESPKKKRKV

SEQ ID NO: 337 - protein, 1588 aa, synthetic construct
  REGION 1..1588: note = ABE8.17-m polypeptide sequence
  REGION 1..167: note = MISC_FEATURE - Adenosine deaminase sequence
  REGION 168..199: note = MISC_FEATURE - Linker sequence
  REGION 200..1566: note = MISC_FEATURE - Sequence derived from Cas9
  REGION 1567..1588: note = MISC_FEATURE - Bipartite nuclear localization sequence
MSEVEFSHEYWMRHALTLAKRARDEREVPVGAVLVLNNRVIGEGWNRAIGLHDPTAHAEIMALRQGGLVMQNYRLIDATLYSTFEPCVMCAGAMIHSRIGRVVFGVRNAKTGAAGSLMDVLHYPGMNHRVEITEGILADECAALLCYFFRMPRRVFNAQKKAQSSTDSGGSSGGSSGSETPGTSESATPESSGGSSGGSDKKYSIGLAIGTNSVGWAVITDEYKVPSKKFKVLGNTDRHSIKKNLIGALLFDSGETAEATRLKRTARRRYTRRKNRICYLQEIFSNEMAKVDDSFFHRLEESFLVEEDKKHERHPIFGNIVDEVAYHEKYPTIYHLRKKLVDSTDKADLRLIYLALAHMIKFRGHFLIEGDLNPDNSDVDKLFIQLVQTYNQLFEENPINASGVDAKAILSARLSKSRRLENLIAQLPGEKKNGLFGNLIALSLGLTPNFKSNFDLAEDAKLQLSKDTYDDDLDNLLAQIGDQYADLFLAAKNLSDAILLSDILRVNTEITKAPLSASMIKRYDEHHQDLTLLKALVRQQLPEKYKEIFFDQSKNGYAGYIDGGASQEEFYKFIKPILEKMDGTEELLVKLNREDLLRKQRTFDNGSIPHQIHLGELHAILRRQEDFYPFLKDNREKIEKILTFRIPYYVGPLARGNSRFAWMTRKSEETITPWNFEEVVDKGASAQSFIERMTNFDKNLPNEKVLPKHSLLYEYFTVYNELTKVKYVTEGMRKPAFLSGEQKKAIVDLLFKTNRKVTVKQLKEDYFKKIECFDSVEISGVEDRFNASLGTYHDLLKIIKDKDFLDNEENEDILEDIVLTLTLFEDREMIEERLKTYAHLFDDKVMKQLKRRRYTGWGRLSRKLINGIRDKQSGKTILDFLKSDGFANRNFMQLIHDDSLTFKEDIQKAQVSGQGDSLHEHIANLAGSPAIKKGILQTVKVVDELVKVMGRHKPENIVIEMARENQTTQKGQKNSRERMKRIEEGIKELGSQILKEHPVENTQLQNEKLYLYYLQNGRDMYVDQELDINRLSDYDVDHIVPQSFLKDDSIDNKVLTRSDKNRGKSDNVPSEEVVKKMKNYWRQLLNAKLITQRKFDNLTKAERGGLSELDKAGFIKRQLVETRQITKHVAQILDSRMNTKYDENDKLIREVKVITLKSKLVSDFRKDFQFYKVREINNYHHAHDAYLNAVVGTALIKKYPKLESEFVYGDYKVYDVRKMIAKSEQEIGKATAKYFFYSNIMNFFKTEITLANGEIRKRPLIETNGETGEIVWDKGRDFATVRKVLSMPQVNIVKKTEVQTGGFSKESILPKRNSDKLIARKKDWDPKKYGGFDSPTVAYSVLVVAKVEKGKSKKLKSVKELLGITIMERSSFEKNPIDFLEAKGYKEVKKDLIIKLPKYSLFELENGRKRMLASAGELQKGNELALPSKYVNFLYLASHYEKLKGSPEDNEQKQLFVEQHKHYLDEIIEQISEFSKRVILADANLDKVLSAYNKHRDKPIREQAENIIHLFTLTNLGAPAAFKYFDTTIDRKRYTSTKEVLDATLIHQSITGLYETRIDLSQLGGDEGADKRTADGSEFESPKKKRKV

SEQ ID NO: 338 - protein, 1786 aa, synthetic construct
  REGION 1..1786: note = ABE8.17-d polypeptide sequence
  REGION 1..167: note = MISC_FEATURE - Adenosine deaminase sequence
  REGION 168..199: note = MISC_FEATURE - Linker sequence
  REGION 200..365: note = MISC_FEATURE - Adenosine deaminase sequence
  REGION 366..397: note = MISC_FEATURE - Linker sequence
  REGION 398..1764: note = MISC_FEATURE - Sequence derived from Cas9
  REGION 1765..1786: note = MISC_FEATURE - Bipartite nuclear localization sequence
MSEVEFSHEYWMRHALTLAKRAWDEREVPVGAVLVHNNRVIGEGWNRPIGRHDPTAHAEIMALRQGGLVMQNYRLIDATLYVTLEPCVMCAGAMIHSRIGRVVFGARDAKTGAAGSLMDVLHHPGMNHRVEITEGILADECAALLSDFFRMRRQEIKAQKKAQSSTDSGGSSGGSSGSETPGTSESATPESSGGSSGGSSEVEFSHEYWMRHALTLAKRARDEREVPVGAVLVLNNRVIGEGWNRAIGLHDPTAHAEIMALRQGGLVMQNYRLIDATLYSTFEPCVMCAGAMIHSRIGRVVFGVRNAKTGAAGSLMDVLHYPGMNHRVEITEGILADECAALLCYFFRMPRRVFNAQKKAQSSTDSGGSSGGSSGSETPGTSESATPESSGGSSGGSDKKYSIGLAIGTNSVGWAVITDEYKVPSKKFKVLGNTDRHSIKKNLIGALLFDSGETAEATRLKRTARRRYTRRKNRICYLQEIFSNEMAKVDDSFFHRLEESFLVEEDKKHERHPIFGNIVDEVAYHEKYPTIYHLRKKLVDSTDKADLRLIYLALAHMIKFRGHFLIEGDLNPDNSDVDKLFIQLVQTYNQLFEENPINASGVDAKAILSARLSKSRRLENLIAQLPGEKKNGLFGNLIALSLGLTPNFKSNFDLAEDAKLQLSKDTYDDDLDNLLAQIGDQYADLFLAAKNLSDAILLSDILRVNTEITKAPLSASMIKRYDEHHQDLTLLKALVRQQLPEKYKEIFFDQSKNGYAGYIDGGASQEEFYKFIKPILEKMDGTEELLVKLNREDLLRKQRTFDNGSIPHQIHLGELHAILRRQEDFYPFLKDNREKIEKILTFRIPYYVGPLARGNSRFAWMTRKSEETITPWNFEEVVDKGASAQSFIERMTNFDKNLPNEKVLPKHSLLYEYFTVYNELTKVKYVTEGMRKPAFLSGEQKKAIVDLLFKTNRKVTVKQLKEDYFKKIECFDSVEISGVEDRFNASLGTYHDLLKIIKDKDFLDNEENEDILEDIVLTLTLFEDREMIEERLKTYAHLFDDKVMKQLKRRRYTGWGRLSRKLINGIRDKQSGKTILDFLKSDGFANRNFMQLIHDDSLTFKEDIQKAQVSGQGDSLHEHIANLAGSPAIKKGILQTVKVVDELVKVMGRHKPENIVIEMARENQTTQKGQKNSRERMKRIEEGIKELGSQILKEHPVENTQLQNEKLYLYYLQNGRDMYVDQELDINRLSDYDVDHIVPQSFLKDDSIDNKVLTRSDKNRGKSDNVPSEEVVKKMKNYWRQLLNAKLITQRKFDNLTKAERGGLSELDKAGFIKRQLVETRQITKHVAQILDSRMNTKYDENDKLIREVKVITLKSKLVSDFRKDFQFYKVREINNYHHAHDAYLNAVVGTALIKKYPKLESEFVYGDYKVYDVRKMIAKSEQEIGKATAKYFFYSNIMNFFKTEITLANGEIRKRPLIETNGETGEIVWDKGRDFATVRKVLSMPQVNIVKKTEVQTGGFSKESILPKRNSDKLIARKKDWDPKKYGGFDSPTVAYSVLVVAKVEKGKSKKLKSVKELLGITIMERSSFEKNPIDFLEAKGYKEVKKDLIIKLPKYSLFELENGRKRMLASAGELQKGNELALPSKYVNFLYLASHYEKLKGSPEDNEQKQLFVEQHKHYLDEIIEQISEFSKRVILADANLDKVLSAYNKHRDKPIREQAENIIHLFTLTNLGAPAAFKYFDTTIDRKRYTSTKEVLDATLIHQSITGLYETRIDLSQLGGDEGADKRTADGSEFESPKKKRKV

SEQ ID NO: 339 - protein, 1588 aa, synthetic construct
  REGION 1..1588: note = ABE8.20-m polypeptide sequence
  REGION 1..167: note = MISC_FEATURE - Adenosine deaminase sequence
  REGION 168..199: note = MISC_FEATURE - Linker sequence
  REGION 200..1566: note = MISC_FEATURE - Sequence derived from Cas9
  REGION 1567..1588: note = MISC_FEATURE - Bipartite nuclear localization sequence
MSEVEFSHEYWMRHALTLAKRARDEREVPVGAVLVLNNRVIGEGWNRAIGLHDPTAHAEIMALRQGGLVMQNYRLYDATLYSTFEPCVMCAGAMIHSRIGRVVFGVRNAKTGAAGSLMDVLHHPGMNHRVEITEGILADECAALLCRFFRMPRRVFNAQKKAQSSTDSGGSSGGSSGSETPGTSESATPESSGGSSGGSDKKYSIGLAIGTNSVGWAVITDEYKVPSKKFKVLGNTDRHSIKKNLIGALLFDSGETAEATRLKRTARRRYTRRKNRICYLQEIFSNEMAKVDDSFFHRLEESFLVEEDKKHERHPIFGNIVDEVAYHEKYPTIYHLRKKLVDSTDKADLRLIYLALAHMIKFRGHFLIEGDLNPDNSDVDKLFIQLVQTYNQLFEENPINASGVDAKAILSARLSKSRRLENLIAQLPGEKKNGLFGNLIALSLGLTPNFKSNFDLAEDAKLQLSKDTYDDDLDNLLAQIGDQYADLFLAAKNLSDAILLSDILRVNTEITKAPLSASMIKRYDEHHQDLTLLKALVRQQLPEKYKEIFFDQSKNGYAGYIDGGASQEEFYKFIKPILEKMDGTEELLVKLNREDLLRKQRTFDNGSIPHQIHLGELHAILRRQEDFYPFLKDNREKIEKILTFRIPYYVGPLARGNSRFAWMTRKSEETITPWNFEEVVDKGASAQSFIERMTNFDKNLPNEKVLPKHSLLYEYFTVYNELTKVKYVTEGMRKPAFLSGEQKKAIVDLLFKTNRKVTVKQLKEDYFKKIECFDSVEISGVEDRFNASLGTYHDLLKIIKDKDFLDNEENEDILEDIVLTLTLFEDREMIEERLKTYAHLFDDKVMKQLKRRRYTGWGRLSRKLINGIRDKQSGKTILDFLKSDGFANRNFMQLIHDDSLTFKEDIQKAQVSGQGDSLHEHIANLAGSPAIKKGILQTVKVVDELVKVMGRHKPENIVIEMARENQTTQKGQKNSRERMKRIEEGIKELGSQILKEHPVENTQLQNEKLYLYYLQNGRDMYVDQELDINRLSDYDVDHIVPQSFLKDDSIDNKVLTRSDKNRGKSDNVPSEEVVKKMKNYWRQLLNAKLITQRKFDNLTKAERGGLSELDKAGFIKRQLVETRQITKHVAQILDSRMNTKYDENDKLIREVKVITLKSKLVSDFRKDFQFYKVREINNYHHAHDAYLNAVVGTALIKKYPKLESEFVYGDYKVYDVRKMIAKSEQEIGKATAKYFFYSNIMNFFKTEITLANGEIRKRPLIETNGETGEIVWDKGRDFATVRKVLSMPQVNIVKKTEVQTGGFSKESILPKRNSDKLIARKKDWDPKKYGGFDSPTVAYSVLVVAKVEKGKSKKLKSVKELLGITIMERSSFEKNPIDFLEAKGYKEVKKDLIIKLPKYSLFELENGRKRMLASAGELQKGNELALPSKYVNFLYLASHYEKLKGSPEDNEQKQLFVEQHKHYLDEIIEQISEFSKRVILADANLDKVLSAYNKHRDKPIREQAENIIHLFTLTNLGAPAAFKYFDTTIDRKRYTSTKEVLDATLIHQSITGLYETRIDLSQLGGDEGADKRTADGSEFESPKKKRKV

SEQ ID NO: 340 - protein, 1786 aa, synthetic construct
  REGION 1..1786: note = ABE8.20-d polypeptide sequence
  REGION 1..167: note = MISC_FEATURE - Adenosine deaminase sequence
  REGION 168..199: note = MISC_FEATURE - Linker sequence
  REGION 200..365: note = MISC_FEATURE - Adenosine deaminase sequence
  REGION 366..397: note = MISC_FEATURE - Linker sequence
  REGION 398..1764: note = MISC_FEATURE - Sequence derived from Cas9
  REGION 1765..1786: note = MISC_FEATURE - Bipartite nuclear localization sequence
MSEVEFSHEYWMRHALTLAKRAWDEREVPVGAVLVHNNRVIGEGWNRPIGRHDPTAHAEIMALRQGGLVMQNYRLIDATLYVTLEPCVMCAGAMIHSRIGRVVFGARDAKTGAAGSLMDVLHHPGMNHRVEITEGILADECAALLSDFFRMRRQEIKAQKKAQSSTDSGGSSGGSSGSETPGTSESATPESSGGSSGGSSEVEFSHEYWMRHALTLAKRARDEREVPVGAVLVLNNRVIGEGWNRAIGLHDPTAHAEIMALRQGGLVMQNYRLYDATLYSTFEPCVMCAGAMIHSRIGRVVFGVRNAKTGAAGSLMDVLHHPGMNHRVEITEGILADECAALLCRFFRMPRRVFNAQKKAQSSTDSGGSSGGSSGSETPGTSESATPESSGGSSGGSDKKYSIGLAIGTNSVGWAVITDEYKVPSKKFKVLGNTDRHSIKKNLIGALLFDSGETAEATRLKRTARRRYTRRKNRICYLQEIFSNEMAKVDDSFFHRLEESFLVEEDKKHERHPIFGNIVDEVAYHEKYPTIYHLRKKLVDSTDKADLRLIYLALAHMIKFRGHFLIEGDLNPDNSDVDKLFIQLVQTYNQLFEENPINASGVDAKAILSARLSKSRRLENLIAQLPGEKKNGLFGNLIALSLGLTPNFKSNFDLAEDAKLQLSKDTYDDDLDNLLAQIGDQYADLFLAAKNLSDAILLSDILRVNTEITKAPLSASMIKRYDEHHQDLTLLKALVRQQLPEKYKEIFFDQSKNGYAGYIDGGASQEEFYKFIKPILEKMDGTEELLVKLNREDLLRKQRTFDNGSIPHQIHLGELHAILRRQEDFYPFLKDNREKIEKILTFRIPYYVGPLARGNSRFAWMTRKSEETITPWNFEEVVDKGASAQSFIERMTNFDKNLPNEKVLPKHSLLYEYFTVYNELTKVKYVTEGMRKPAFLSGEQKKAIVDLLFKTNRKVTVKQLKEDYFKKIECFDSVEISGVEDRFNASLGTYHDLLKIIKDKDFLDNEENEDILEDIVLTLTLFEDREMIEERLKTYAHLFDDKVMKQLKRRRYTGWGRLSRKLINGIRDKQSGKTILDFLKSDGFANRNFMQLIHDDSLTFKEDIQKAQVSGQGDSLHEHIANLAGSPAIKKGILQTVKVVDELVKVMGRHKPENIVIEMARENQTTQKGQKNSRERMKRIEEGIKELGSQILKEHPVENTQLQNEKLYLYYLQNGRDMYVDQELDINRLSDYDVDHIVPQSFLKDDSIDNKVLTRSDKNRGKSDNVPSEEVVKKMKNYWRQLLNAKLITQRKFDNLTKAERGGLSELDKAGFIKRQLVETRQITKHVAQILDSRMNTKYDENDKLIREVKVITLKSKLVSDFRKDFQFYKVREINNYHHAHDAYLNAVVGTALIKKYPKLESEFVYGDYKVYDVRKMIAKSEQEIGKATAKYFFYSNIMNFFKTEITLANGEIRKRPLIETNGETGEIVWDKGRDFATVRKVLSMPQVNIVKKTEVQTGGFSKESILPKRNSDKLIARKKDWDPKKYGGFDSPTVAYSVLVVAKVEKGKSKKLKSVKELLGITIMERSSFEKNPIDFLEAKGYKEVKKDLIIKLPKYSLFELENGRKRMLASAGELQKGNELALPSKYVNFLYLASHYEKLKGSPEDNEQKQLFVEQHKHYLDEIIEQISEFSKRVILADANLDKVLSAYNKHRDKPIREQAENIIHLFTLTNLGAPAAFKYFDTTIDRKRYTSTKEVLDATLIHQSITGLYETRIDLSQLGGDEGADKRTADGSEFESPKKKRKV

SEQ ID NO: 341 - protein, 1588 aa, synthetic construct
  REGION 1..1588: note = 01. monoABE8.1_bpNLS + Y147T polypeptide sequence
MSEVEFSHEYWMRHALTLAKRARDEREVPVGAVLVLNNRVIGEGWNRAIGLHDPTAHAEIMALRQGGLVMQNYRLIDATLYVTFEPCVMCAGAMIHSRIGRVVFGVRNAKTGAAGSLMDVLHYPGMNHRVEITEGILADECAALLCTFFRMPRQVFNAQKKAQSSTDSGGSSGGSSGSETPGTSESATPESSGGSSGGSDKKYSIGLAIGTNSVGWAVITDEYKVPSKKFKVLGNTDRHSIKKNLIGALLFDSGETAEATRLKRTARRRYTRRKNRICYLQEIFSNEMAKVDDSFFHRLEESFLVEEDKKHERHPIFGNIVDEVAYHEKYPTIYHLRKKLVDSTDKADLRLIYLALAHMIKFRGHFLIEGDLNPDNSDVDKLFIQLVQTYNQLFEENPINASGVDAKAILSARLSKSRRLENLIAQLPGEKKNGLFGNLIALSLGLTPNFKSNFDLAEDAKLQLSKDTYDDDLDNLLAQIGDQYADLFLAAKNLSDAILLSDILRVNTEITKAPLSASMIKRYDEHHQDLTLLKALVRQQLPEKYKEIFFDQSKNGYAGYIDGGASQEEFYKFIKPILEKMDGTEELLVKLNREDLLRKQRTFDNGSIPHQIHLGELHAILRRQEDFYPFLKDNREKIEKILTFRIPYYVGPLARGNSRFAWMTRKSEETITPWNFEEVVDKGASAQSFIERMTNFDKNLPNEKVLPKHSLLYEYFTVYNELTKVKYVTEGMRKPAFLSGEQKKAIVDLLFKTNRKVTVKQLKEDYFKKIECFDSVEISGVEDRFNASLGTYHDLLKIIKDKDFLDNEENEDILEDIVLTLTLFEDREMIEERLKTYAHLFDDKVMKQLKRRRYTGWGRLSRKLINGIRDKQSGKTILDFLKSDGFANRNFMQLIHDDSLTFKEDIQKAQVSGQGDSLHEHIANLAGSPAIKKGILQTVKVVDELVKVMGRHKPENIVIEMARENQTTQKGQKNSRERMKRIEEGIKELGSQILKEHPVENTQLQNEKLYLYYLQNGRDMYVDQELDINRLSDYDVDHIVPQSFLKDDSIDNKVLTRSDKNRGKSDNVPSEEVVKKMKNYWRQLLNAKLITQRKFDNLTKAERGGLSELDKAGFIKRQLVETRQITKHVAQILDSRMNTKYDENDKLIREVKVITLKSKLVSDFRKDFQFYKVREINNYHHAHDAYLNAVVGTALIKKYPKLESEFVYGDYKVYDVRKMIAKSEQEIGKATAKYFFYSNIMNFFKTEITLANGEIRKRPLIETNGETGEIVWDKGRDFATVRKVLSMPQVNIVKKTEVQTGGFSKESILPKRNSDKLIARKKDWDPKKYGGFVSPTVAYSVLVVAKVEKGKSKKLKSVKELLGITIMERSSFEKNPIDFLEAKGYKEVKKDLIIKLPKYSLFELENGRKRMLASARELQKGNELALPSKYVNFLYLASHYEKLKGSPEDNEQKQLFVEQHKHYLDEIIEQISEFSKRVILADANLDKVLSAYNKHRDKPIREQAENIIHLFTLTNLGAPAAFKYFDTTIDRKQYRSTKEVLDATLIHQSITGLYETRIDLSQLGGDEGADKRTADGSEFESPKKKRKV

SEQ ID NO: 342 - protein, 1588 aa, synthetic construct
  REGION 1..1588: note = 02. monoABE8.1_bpNLS + Y147R polypeptide sequence
MSEVEFSHEYWMRHALTLAKRARDEREVPVGAVLVLNNRVIGEGWNRAIGLHDPTAHAEIMALRQGGLVMQNYRLIDATLYVTFEPCVMCAGAMIHSRIGRVVFGVRNAKTGAAGSLMDVLHYPGMNHRVEITEGILADECAALLCRFFRMPRQVFNAQKKAQSSTDSGGSSGGSSGSETPGTSESATPESSGGSSGGSDKKYSIGLAIGTNSVGWAVITDEYKVPSKKFKVLGNTDRHSIKKNLIGALLFDSGETAEATRLKRTARRRYTRRKNRICYLQEIFSNEMAKVDDSFFHRLEESFLVEEDKKHERHPIFGNIVDEVAYHEKYPTIYHLRKKLVDSTDKADLRLIYLALAHMIKFRGHFLIEGDLNPDNSDVDKLFIQLVQTYNQLFEENPINASGVDAKAILSARLSKSRRLENLIAQLPGEKKNGLFGNLIALSLGLTPNFKSNFDLAEDAKLQLSKDTYDDDLDNLLAQIGDQYADLFLAAKNLSDAILLSDILRVNTEITKAPLSASMIKRYDEHHQDLTLLKALVRQQLPEKYKEIFFDQSKNGYAGYIDGGASQEEFYKFIKPILEKMDGTEELLVKLNREDLLRKQRTFDNGSIPHQIHLGELHAILRRQEDFYPFLKDNREKIEKILTFRIPYYVGPLARGNSRFAWMTRKSEETITPWNFEEVVDKGASAQSFIERMTNFDKNLPNEKVLPKHSLLYEYFTVYNELTKVKYVTEGMRKPAFLSGEQKKAIVDLLFKTNRKVTVKQLKEDYFKKIECFDSVEISGVEDRFNASLGTYHDLLKIIKDKDFLDNEENEDILEDIVLTLTLFEDREMIEERLKTYAHLFDDKVMKQLKRRRYTGWGRLSRKLINGIRDKQSGKTILDFLKSDGFANRNFMQLIHDDSLTFKEDIQKAQVSGQGDSLHEHIANLAGSPAIKKGILQTVKVVDELVKVMGRHKPENIVIEMARENQTTQKGQKNSRERMKRIEEGIKELGSQILKEHPVENTQLQNEKLYLYYLQNGRDMYVDQELDINRLSDYDVDHIVPQSFLKDDSIDNKVLTRSDKNRGKSDNVPSEEVVKKMKNYWRQLLNAKLITQRKFDNLTKAERGGLSELDKAGFIKRQLVETRQITKHVAQILDSRMNTKYDENDKLIREVKVITLKSKLVSDFRKDFQFYKVREINNYHHAHDAYLNAVVGTALIKKYPKLESEFVYGDYKVYDVRKMIAKSEQEIGKATAKYFFYSNIMNFFKTEITLANGEIRKRPLIETNGETGEIVWDKGRDFATVRKVLSMPQVNIVKKTEVQTGGFSKESILPKRNSDKLIARKKDWDPKKYGGFVSPTVAYSVLVVAKVEKGKSKKLKSVKELLGITIMERSSFEKNPIDFLEAKGYKEVKKDLIIKLPKYSLFELENGRKRMLASARELQKGNELALPSKYVNFLYLASHYEKLKGSPEDNEQKQLFVEQHKHYLDEIIEQISEFSKRVILADANLDKVLSAYNKHRDKPIREQAENIIHLFTLTNLGAPAAFKYFDTTIDRKQYRSTKEVLDATLIHQSITGLYETRIDLSQLGGDEGADKRTADGSEFESPKKKRKV

SEQ ID NO: 343 - protein, 1588 aa, synthetic construct
  REGION 1..1588: note = 03. monoABE8.1_bpNLS + Q154S polypeptide sequence
MSEVEFSHEYWMRHALTLAKRARDEREVPVGAVLVLNNRVIGEGWNRAIGLHDPTAHAEIMALRQGGLVMQNYRLIDATLYVTFEPCVMCAGAMIHSRIGRVVFGVRNAKTGAAGSLMDVLHYPGMNHRVEITEGILADECAALLCYFFRMPRSVFNAQKKAQSSTDSGGSSGGSSGSETPGTSESATPESSGGSSGGSDKKYSIGLAIGTNSVGWAVITDEYKVPSKKFKVLGNTDRHSIKKNLIGALLFDSGETAEATRLKRTARRRYTRRKNRICYLQEIFSNEMAKVDDSFFHRLEESFLVEEDKKHERHPIFGNIVDEVAYHEKYPTIYHLRKKLVDSTDKADLRLIYLALAHMIKFRGHFLIEGDLNPDNSDVDKLFIQLVQTYNQLFEENPINASGVDAKAILSARLSKSRRLENLIAQLPGEKKNGLFGNLIALSLGLTPNFKSNFDLAEDAKLQLSKDTYDDDLDNLLAQIGDQYADLFLAAKNLSDAILLSDILRVNTEITKAPLSASMIKRYDEHHQDLTLLKALVRQQLPEKYKEIFFDQSKNGYAGYIDGGASQEEFYKFIKPILEKMDGTEELLVKLNREDLLRKQRTFDNGSIPHQIHLGELHAILRRQEDFYPFLKDNREKIEKILTFRIPYYVGPLARGNSRFAWMTRKSEETITPWNFEEVVDKGASAQSFIERMTNFDKNLPNEKVLPKHSLLYEYFTVYNELTKVKYVTEGMRKPAFLSGEQKKAIVDLLFKTNRKVTVKQLKEDYFKKIECFDSVEISGVEDRFNASLGTYHDLLKIIKDKDFLDNEENEDILEDIVLTLTLFEDREMIEERLKTYAHLFDDKVMKQLKRRRYTGWGRLSRKLINGIRDKQSGKTILDFLKSDGFANRNFMQLIHDDSLTFKEDIQKAQVSGQGDSLHEHIANLAGSPAIKKGILQTVKVVDELVKVMGRHKPENIVIEMARENQTTQKGQKNSRERMKRIEEGIKELGSQILKEHPVENTQLQNEKLYLYYLQNGRDMYVDQELDINRLSDYDVDHIVPQSFLKDDSIDNKVLTRSDKNRGKSDNVPSEEVVKKMKNYWRQLLNAKLITQRKFDNLTKAERGGLSELDKAGFIKRQLVETRQITKHVAQILDSRMNTKYDENDKLIREVKVITLKSKLVSDFRKDFQFYKVREINNYHHAHDAYLNAVVGTALIKKYPKLESEFVYGDYKVYDVRKMIAKSEQEIGKATAKYFFYSNIMNFFKTEITLANGEIRKRPLIETNGETGEIVWDKGRDFATVRKVLSMPQVNIVKKTEVQTGGFSKESILPKRNSDKLIARKKDWDPKKYGGFVSPTVAYSVLVVAKVEKGKSKKLKSVKELLGITIMERSSFEKNPIDFLEAKGYKEVKKDLIIKLPKYSLFELENGRKRMLASARELQKGNELALPSKYVNFLYLASHYEKLKGSPEDNEQKQLFVEQHKHYLDEIIEQISEFSKRVILADANLDKVLSAYNKHRDKPIREQAENIIHLFTLTNLGAPAAFKYFDTTIDRKQYRSTKEVLDATLIHQSITGLYETRIDLSQLGGDEGADKRTADGSEFESPKKKRKV

SEQ ID NO: 344 - protein, 1588 aa, synthetic construct
  REGION 1..1588: note = 04. monoABE8.1_bpNLS + Y123H polypeptide sequence
MSEVEFSHEYWMRHALTLAKRARDEREVPVGAVLVLNNRVIGEGWNRAIGLHDPTAHAEIMALRQGGLVMQNYRLIDATLYVTFEPCVMCAGAMIHSRIGRVVFGVRNAKTGAAGSLMDVLHHPGMNHRVEITEGILADECAALLCYFFRMPRQVFNAQKKAQSSTDSGGSSGGSSGSETPGTSESATPESSGGSSGGSDKKYSIGLAIGTNSVGWAVITDEYKVPSKKFKVLGNTDRHSIKKNLIGALLFDSGETAEATRLKRTARRRYTRRKNRICYLQEIFSNEMAKVDDSFFHRLEESFLVEEDKKHERHPIFGNIVDEVAYHEKYPTIYHLRKKLVDSTDKADLRLIYLALAHMIKFRGHFLIEGDLNPDNSDVDKLFIQLVQTYNQLFEENPINASGVDAKAILSARLSKSRRLENLIAQLPGEKKNGLFGNLIALSLGLTPNFKSNFDLAEDAKLQLSKDTYDDDLDNLLAQIGDQYADLFLAAKNLSDAILLSDILRVNTEITKAPLSASMIKRYDEHHQDLTLLKALVRQQLPEKYKEIFFDQSKNGYAGYIDGGASQEEFYKFIKPILEKMDGTEELLVKLNREDLLRKQRTFDNGSIPHQIHLGELHAILRRQEDFYPFLKDNREKIEKILTFRIPYYVGPLARGNSRFAWMTRKSEETITPWNFEEVVDKGASAQSFIERMTNFDKNLPNEKVLPKHSLLYEYFTVYNELTKVKYVTEGMRKPAFLSGEQKKAIVDLLFKTNRKVTVKQLKEDYFKKIECFDSVEISGVEDRFNASLGTYHDLLKIIKDKDFLDNEENEDILEDIVLTLTLFEDREMIEERLKTYAHLFDDKVMKQLKRRRYTGWGRLSRKLINGIRDKQSGKTILDFLKSDGFANRNFMQLIHDDSLTFKEDIQKAQVSGQGDSLHEHIANLAGSPAIKKGILQTVKVVDELVKVMGRHKPENIVIEMARENQTTQKGQKNSRERMKRIEEGIKELGSQILKEHPVENTQLQNEKLYLYYLQNGRDMYVDQELDINRLSDYDVDHIVPQSFLKDDSIDNKVLTRSDKNRGKSDNVPSEEVVKKMKNYWRQLLNAKLITQRKFDNLTKAERGGLSELDKAGFIKRQLVETRQITKHVAQILDSRMNTKYDENDKLIREVKVITLKSKLVSDFRKDFQFYKVREINNYHHAHDAYLNAVVGTALIKKYPKLESEFVYGDYKVYDVRKMIAKSEQEIGKATAKYFFYSNIMNFFKTEITLANGEIRKRPLIETNGETGEIVWDKGRDFATVRKVLSMPQVNIVKKTEVQTGGFSKESILPKRNSDKLIARKKDWDPKKYGGFVSPTVAYSVLVVAKVEKGKSKKLKSVKELLGITIMERSSFEKNPIDFLEAKGYKEVKKDLIIKLPKYSLFELENGRKRMLASARELQKGNELALPSKYVNFLYLASHYEKLKGSPEDNEQKQLFVEQHKHYLDEIIEQISEFSKRVILADANLDKVLSAYNKHRDKPIREQAENIIHLFTLTNLGAPAAFKYFDTTIDRKQYRSTKEVLDATLIHQSITGLYETRIDLSQLGGDEGADKRTADGSEFESPKKKRKV

SEQ ID NO: 345 - protein, 1588 aa, synthetic construct
  REGION 1..1588: note = 05. monoABE8.1_bpNLS + V82S polypeptide sequence
MSEVEFSHEYWMRHALTLAKRARDEREVPVGAVLVLNNRVIGEGWNRAIGLHDPTAHAEIMALRQGGLVMQNYRLIDATLYSTFEPCVMCAGAMIHSRIGRVVFGVRNAKTGAAGSLMDVLHYPGMNHRVEITEGILADECAALLCYFFRMPRQVFNAQKKAQSSTDSGGSSGGSSGSETPGTSESATPESSGGSSGGSDKKYSIGLAIGTNSVGWAVITDEYKVPSKKFKVLGNTDRHSIKKNLIGALLFDSGETAEATRLKRTARRRYTRRKNRICYLQEIFSNEMAKVDDSFFHRLEESFLVEEDKKHERHPIFGNIVDEVAYHEKYPTIYHLRKKLVDSTDKADLRLIYLALAHMIKFRGHFLIEGDLNPDNSDVDKLFIQLVQTYNQLFEENPINASGVDAKAILSARLSKSRRLENLIAQLPGEKKNGLFGNLIALSLGLTPNFKSNFDLAEDAKLQLSKDTYDDDLDNLLAQIGDQYADLFLAAKNLSDAILLSDILRVNTEITKAPLSASMIKRYDEHHQDLTLLKALVRQQLPEKYKEIFFDQSKNGYAGYIDGGASQEEFYKFIKPILEKMDGTEELLVKLNREDLLRKQRTFDNGSIPHQIHLGELHAILRRQEDFYPFLKDNREKIEKILTFRIPYYVGPLARGNSRFAWMTRKSEETITPWNFEEVVDKGASAQSFIERMTNFDKNLPNEKVLPKHSLLYEYFTVYNELTKVKYVTEGMRKPAFLSGEQKKAIVDLLFKTNRKVTVKQLKEDYFKKIECFDSVEISGVEDRFNASLGTYHDLLKIIKDKDFLDNEENEDILEDIVLTLTLFEDREMIEERLKTYAHLFDDKVMKQLKRRRYTGWGRLSRKLINGIRDKQSGKTILDFLKSDGFANRNFMQLIHDDSLTFKEDIQKAQVSGQGDSLHEHIANLAGSPAIKKGILQTVKVVDELVKVMGRHKPENIVIEMARENQTTQKGQKNSRERMKRIEEGIKELGSQILKEHPVENTQLQNEKLYLYYLQNGRDMYVDQELDINRLSDYDVDHIVPQSFLKDDSIDNKVLTRSDKNRGKSDNVPSEEVVKKMKNYWRQLLNAKLITQRKFDNLTKAERGGLSELDKAGFIKRQLVETRQITKHVAQILDSRMNTKYDENDKLIREVKVITLKSKLVSDFRKDFQFYKVREINNYHHAHDAYLNAVVGTALIKKYPKLESEFVYGDYKVYDVRKMIAKSEQEIGKATAKYFFYSNIMNFFKTEITLANGEIRKRPLIETNGETGEIVWDKGRDFATVRKVLSMPQVNIVKKTEVQTGGFSKESILPKRNSDKLIARKKDWDPKKYGGFVSPTVAYSVLVVAKVEKGKSKKLKSVKELLGITIMERSSFEKNPIDFLEAKGYKEVKKDLIIKLPKYSLFELENGRKRMLASARELQKGNELALPSKYVNFLYLASHYEKLKGSPEDNEQKQLFVEQHKHYLDEIIEQISEFSKRVILADANLDKVLSAYNKHRDKPIREQAENIIHLFTLTNLGAPAAFKYFDTTIDRKQYRSTKEVLDATLIHQSITGLYETRIDLSQLGGDEGADKRTADGSEFESPKKKRKV

SEQ ID NO: 346 - protein, 1588 aa, synthetic construct
  REGION 1..1588: note = 06. monoABE8.1_bpNLS + T166R polypeptide sequence
MSEVEFSHEYWMRHALTLAKRARDEREVPVGAVLVLNNRVIGEGWNRAIGLHDPTAHAEIMALRQGGLVMQNYRLIDATLYVTFEPCVMCAGAMIHSRIGRVVFGVRNAKTGAAGSLMDVLHYPGMNHRVEITEGILADECAALLCYFFRMPRQVFNAQKKAQSSRDSGGSSGGSSGSETPGTSESATPESSGGSSGGSDKKYSIGLAIGTNSVGWAVITDEYKVPSKKFKVLGNTDRHSIKKNLIGALLFDSGETAEATRLKRTARRRYTRRKNRICYLQEIFSNEMAKVDDSFFHRLEESFLVEEDKKHERHPIFGNIVDEVAYHEKYPTIYHLRKKLVDSTDKADLRLIYLALAHMIKFRGHFLIEGDLNPDNSDVDKLFIQLVQTYNQLFEENPINASGVDAKAILSARLSKSRRLENLIAQLPGEKKNGLFGNLIALSLGLTPNFKSNFDLAEDAKLQLSKDTYDDDLDNLLAQIGDQYADLFLAAKNLSDAILLSDILRVNTEITKAPLSASMIKRYDEHHQDLTLLKALVRQQLPEKYKEIFFDQSKNGYAGYIDGGASQEEFYKFIKPILEKMDGTEELLVKLNREDLLRKQRTFDNGSIPHQIHLGELHAILRRQEDFYPFLKDNREKIEKILTFRIPYYVGPLARGNSRFAWMTRKSEETITPWNFEEVVDKGASAQSFIERMTNFDKNLPNEKVLPKHSLLYEYFTVYNELTKVKYVTEGMRKPAFLSGEQKKAIVDLLFKTNRKVTVKQLKEDYFKKIECFDSVEISGVEDRFNASLGTYHDLLKIIKDKDFLDNEENEDILEDIVLTLTLFEDREMIEERLKTYAHLFDDKVMKQLKRRRYTGWGRLSRKLINGIRDKQSGKTILDFLKSDGFANRNFMQLIHDDSLTFKEDIQKAQVSGQGDSLHEHIANLAGSPAIKKGILQTVKVVDELVKVMGRHKPENIVIEMARENQTTQKGQKNSRERMKRIEEGIKELGSQILKEHPVENTQLQNEKLYLYYLQNGRDMYVDQELDINRLSDYDVDHIVPQSFLKDDSIDNKVLTRSDKNRGKSDNVPSEEVVKKMKNYWRQLLNAKLITQRKFDNLTKAERGGLSELDKAGFIKRQLVETRQITKHVAQILDSRMNTKYDENDKLIREVKVITLKSKLVSDFRKDFQFYKVREINNYHHAHDAYLNAVVGTALIKKYPKLESEFVYGDYKVYDVRKMIAKSEQEIGKATAKYFFYSNIMNFFKTEITLANGEIRKRPLIETNGETGEIVWDKGRDFATVRKVLSMPQVNIVKKTEVQTGGFSKESILPKRNSDKLIARKKDWDPKKYGGFVSPTVAYSVLVVAKVEKGKSKKLKSVKELLGITIMERSSFEKNPIDFLEAKGYKEVKKDLIIKLPKYSLFELENGRKRMLASARELQKGNELALPSKYVNFLYLASHYEKLKGSPEDNEQKQLFVEQHKHYLDEIIEQISEFSKRVILADANLDKVLSAYNKHRDKPIREQAENIIHLFTLTNLGAPAAFKYFDTTIDRKQYRSTKEVLDATLIHQSITGLYETRIDLSQLGGDEGADKRTADGSEFESPKKKRKV

SEQ ID NO: 347 - protein, 1588 aa, synthetic construct
  REGION 1..1588: note = 07. monoABE8.1_bpNLS + Q154R polypeptide sequence
MSEVEFSHEYWMRHALTLAKRARDEREVPVGAVLVLNNRVIGEGWNRAIGLHDPTAHAEIMALRQGGLVMQNYRLIDATLYVTFEPCVMCAGAMIHSRIGRVVFGVRNAKTGAAGSLMDVLHYPGMNHRVEITEGILADECAALLCYFFRMPRRVFNAQKKAQSSTDSGGSSGGSSGSETPGTSESATPESSGGSSGGSDKKYSIGLAIGTNSVGWAVITDEYKVPSKKFKVLGNTDRHSIKKNLIGALLFDSGETAEATRLKRTARRRYTRRKNRICYLQEIFSNEMAKVDDSFFHRLEESFLVEEDKKHERHPIFGNIVDEVAYHEKYPTIYHLRKKLVDSTDKADLRLIYLALAHMIKFRGHFLIEGDLNPDNSDVDKLFIQLVQTYNQLFEENPINASGVDAKAILSARLSKSRRLENLIAQLPGEKKNGLFGNLIALSLGLTPNFKSNFDLAEDAKLQLSKDTYDDDLDNLLAQIGDQYADLFLAAKNLSDAILLSDILRVNTEITKAPLSASMIKRYDEHHQDLTLLKALVRQQLPEKYKEIFFDQSKNGYAGYIDGGASQEEFYKFIKPILEKMDGTEELLVKLNREDLLRKQRTFDNGSIPHQIHLGELHAILRRQEDFYPFLKDNREKIEKILTFRIPYYVGPLARGNSRFAWMTRKSEETITPWNFEEVVDKGASAQSFIERMTNFDKNLPNEKVLPKHSLLYEYFTVYNELTKVKYVTEGMRKPAFLSGEQKKAIVDLLFKTNRKVTVKQLKEDYFKKIECFDSVEISGVEDRFNASLGTYHDLLKIIKDKDFLDNEENEDILEDIVLTLTLFEDREMIEERLKTYAHLFDDKVMKQLKRRRYTGWGRLSRKLINGIRDKQSGKTILDFLKSDGFANRNFMQLIHDDSLTFKEDIQKAQVSGQGDSLHEHIANLAGSPAIKKGILQTVKVVDELVKVMGRHKPENIVIEMARENQTTQKGQKNSRERMKRIEEGIKELGSQILKEHPVENTQLQNEKLYLYYLQNGRDMYVDQELDINRLSDYDVDHIVPQSFLKDDSIDNKVLTRSDKNRGKSDNVPSEEVVKKMKNYWRQLLNAKLITQRKFDNLTKAERGGLSELDKAGFIKRQLVETRQITKHVAQILDSRMNTKYDENDKLIREVKVITLKSKLVSDFRKDFQFYKVREINNYHHAHDAYLNAVVGTALIKKYPKLESEFVYGDYKVYDVRKMIAKSEQEIGKATAKYFFYSNIMNFFKTEITLANGEIRKRPLIETNGETGEIVWDKGRDFATVRKVLSMPQVNIVKKTEVQTGGFSKESILPKRNSDKLIARKKDWDPKKYGGFVSPTVAYSVLVVAKVEKGKSKKLKSVKELLGITIMERSSFEKNPIDFLEAKGYKEVKKDLIIKLPKYSLFELENGRKRMLASARELQKGNELALPSKYVNFLYLASHYEKLKGSPEDNEQKQLFVEQHKHYLDEIIEQISEFSKRVILADANLDKVLSAYNKHRDKPIREQAENIIHLFTLTNLGAPAAFKYFDTTIDRKQYRSTKEVLDATLIHQSITGLYETRIDLSQLGGDEGADKRTADGSEFESPKKKRKV

SEQ ID NO: 348 - protein, 1588 aa, synthetic construct
  REGION 1..1588: note = 08. monoABE8.1_bpNLS +Y147R_Q154R_Y123H polypeptide sequence
MSEVEFSHEYWMRHALTLAKRARDEREVPVGAVLVLNNRVIGEGWNRAIGLHDPTAHAEIMALRQGGLVMQNYRLIDATLYVTFEPCVMCAGAMIHSRIGRVVFGVRNAKTGAAGSLMDVLHHPGMNHRVEITEGILADECAALLCRFFRMPRRVFNAQKKAQSSTDSGGSSGGSSGSETPGTSESATPESSGGSSGGSDKKYSIGLAIGTNSVGWAVITDEYKVPSKKFKVLGNTDRHSIKKNLIGALLFDSGETAEATRLKRTARRRYTRRKNRICYLQEIFSNEMAKVDDSFFHRLEESFLVEEDKKHERHPIFGNIVDEVAYHEKYPTIYHLRKKLVDSTDKADLRLIYLALAHMIKFRGHFLIEGDLNPDNSDVDKLFIQLVQTYNQLFEENPINASGVDAKAILSARLSKSRRLENLIAQLPGEKKNGLFGNLIALSLGLTPNFKSNFDLAEDAKLQLSKDTYDDDLDNLLAQIGDQYADLFLAAKNLSDAILLSDILRVNTEITKAPLSASMIKRYDEHHQDLTLLKALVRQQLPEKYKEIFFDQSKNGYAGYIDGGASQEEFYKFIKPILEKMDGTEELLVKLNREDLLRKQRTFDNGSIPHQIHLGELHAILRRQEDFYPFLKDNREKIEKILTFRIPYYVGPLARGNSRFAWMTRKSEETITPWNFEEVVDKGASAQSFIERMTNFDKNLPNEKVLPKHSLLYEYFTVYNELTKVKYVTEGMRKPAFLSGEQKKAIVDLLFKTNRKVTVKQLKEDYFKKIECFDSVEISGVEDRFNASLGTYHDLLKIIKDKDFLDNEENEDILEDIVLTLTLFEDREMIEERLKTYAHLFDDKVMKQLKRRRYTGWGRLSRKLINGIRDKQSGKTILDFLKSDGFANRNFMQLIHDDSLTFKEDIQKAQVSGQGDSLHEHIANLAGSPAIKKGILQTVKVVDELVKVMGRHKPENIVIEMARENQTTQKGQKNSRERMKRIEEGIKELGSQILKEHPVENTQLQNEKLYLYYLQNGRDMYVDQELDINRLSDYDVDHIVPQSFLKDDSIDNKVLTRSDKNRGKSDNVPSEEVVKKMKNYWRQLLNAKLITQRKFDNLTKAERGGLSELDKAGFIKRQLVETRQITKHVAQILDSRMNTKYDENDKLIREVKVITLKSKLVSDFRKDFQFYKVREINNYHHAHDAYLNAVVGTALIKKYPKLESEFVYGDYKVYDVRKMIAKSEQEIGKATAKYFFYSNIMNFFKTEITLANGEIRKRPLIETNGETGEIVWDKGRDFATVRKVLSMPQVNIVKKTEVQTGGFSKESILPKRNSDKLIARKKDWDPKKYGGFVSPTVAYSVLVVAKVEKGKSKKLKSVKELLGITIMERSSFEKNPIDFLEAKGYKEVKKDLIIKLPKYSLFELENGRKRMLASARELQKGNELALPSKYVNFLYLASHYEKLKGSPEDNEQKQLFVEQHKHYLDEIIEQISEFSKRVILADANLDKVLSAYNKHRDKPIREQAENIIHLFTLTNLGAPAAFKYFDTTIDRKQYRSTKEVLDATLIHQSITGLYETRIDLSQLGGDEGADKRTADGSEFESPKKKRKV

SEQ ID NO: 349 - protein, 1588 aa, synthetic construct
  REGION 1..1588: note = 09. monoABE8.1_bpNLS +Y147R_Q154R_I76Y polypeptide sequence
MSEVEFSHEYWMRHALTLAKRARDEREVPVGAVLVLNNRVIGEGWNRAIGLHDPTAHAEIMALRQGGLVMQNYRLYDATLYVTFEPCVMCAGAMIHSRIGRVVFGVRNAKTGAAGSLMDVLHYPGMNHRVEITEGILADECAALLCRFFRMPRRVFNAQKKAQSSTDSGGSSGGSSGSETPGTSESATPESSGGSSGGSDKKYSIGLAIGTNSVGWAVITDEYKVPSKKFKVLGNTDRHSIKKNLIGALLFDSGETAEATRLKRTARRRYTRRKNRICYLQEIFSNEMAKVDDSFFHRLEESFLVEEDKKHERHPIFGNIVDEVAYHEKYPTIYHLRKKLVDSTDKADLRLIYLALAHMIKFRGHFLIEGDLNPDNSDVDKLFIQLVQTYNQLFEENPINASGVDAKAILSARLSKSRRLENLIAQLPGEKKNGLFGNLIALSLGLTPNFKSNFDLAEDAKLQLSKDTYDDDLDNLLAQIGDQYADLFLAAKNLSDAILLSDILRVNTEITKAPLSASMIKRYDEHHQDLTLLKALVRQQLPEKYKEIFFDQSKNGYAGYIDGGASQEEFYKFIKPILEKMDGTEELLVKLNREDLLRKQRTFDNGSIPHQIHLGELHAILRRQEDFYPFLKDNREKIEKILTFRIPYYVGPLARGNSRFAWMTRKSEETITPWNFEEVVDKGASAQSFIERMTNFDKNLPNEKVLPKHSLLYEYFTVYNELTKVKYVTEGMRKPAFLSGEQKKAIVDLLFKTNRKVTVKQLKEDYFKKIECFDSVEISGVEDRFNASLGTYHDLLKIIKDKDFLDNEENEDILEDIVLTLTLFEDREMIEERLKTYAHLFDDKVMKQLKRRRYTGWGRLSRKLINGIRDKQSGKTILDFLKSDGFANRNFMQLIHDDSLTFKEDIQKAQVSGQGDSLHEHIANLAGSPAIKKGILQTVKVVDELVKVMGRHKPENIVIEMARENQTTQKGQKNSRERMKRIEEGIKELGSQILKEHPVENTQLQNEKLYLYYLQNGRDMYVDQELDINRLSDYDVDHIVPQSFLKDDSIDNKVLTRSDKNRGKSDNVPSEEVVKKMKNYWRQLLNAKLITQRKFDNLTKAERGGLSELDKAGFIKRQLVETRQITKHVAQILDSRMNTKYDENDKLIREVKVITLKSKLVSDFRKDFQFYKVREINNYHHAHDAYLNAVVGTALIKKYPKLESEFVYGDYKVYDVRKMIAKSEQEIGKATAKYFFYSNIMNFFKTEITLANGEIRKRPLIETNGETGEIVWDKGRDFATVRKVLSMPQVNIVKKTEVQTGGFSKESILPKRNSDKLIARKKDWDPKKYGGFVSPTVAYSVLVVAKVEKGKSKKLKSVKELLGITIMERSSFEKNPIDFLEAKGYKEVKKDLIIKLPKYSLFELENGRKRMLASARELQKGNELALPSKYVNFLYLASHYEKLKGSPEDNEQKQLFVEQHKHYLDEIIEQISEFSKRVILADANLDKVLSAYNKHRDKPIREQAENIIHLFTLTNLGAPAAFKYFDTTIDRKQYRSTKEVLDATLIHQSITGLYETRIDLSQLGGDEGADKRTADGSEFESPKKKRKV

SEQ ID NO: 350 - protein, 1588 aa, synthetic construct
  REGION 1..1588: note = 10. monoABE8.1_bpNLS +Y147R_Q154R_T166R polypeptide sequence
MSEVEFSHEYWMRHALTLAKRARDEREVPVGAVLVLNNRVIGEGWNRAIGLHDPTAHAEIMALRQGGLVMQNYRLIDATLYVTFEPCVMCAGAMIHSRIGRVVFGVRNAKTGAAGSLMDVLHYPGMNHRVEITEGILADECAALLCRFFRMPRRVFNAQKKAQSSRDSGGSSGGSSGSETPGTSESATPESSGGSSGGSDKKYSIGLAIGTNSVGWAVITDEYKVPSKKFKVLGNTDRHSIKKNLIGALLFDSGETAEATRLKRTARRRYTRRKNRICYLQEIFSNEMAKVDDSFFHRLEESFLVEEDKKHERHPIFGNIVDEVAYHEKYPTIYHLRKKLVDSTDKADLRLIYLALAHMIKFRGHFLIEGDLNPDNSDVDKLFIQLVQTYNQLFEENPINASGVDAKAILSARLSKSRRLENLIAQLPGEKKNGLFGNLIALSLGLTPNFKSNFDLAEDAKLQLSKDTYDDDLDNLLAQIGDQYADLFLAAKNLSDAILLSDILRVNTEITKAPLSASMIKRYDEHHQDLTLLKALVRQQLPEKYKEIFFDQSKNGYAGYIDGGASQEEFYKFIKPILEKMDGTEELLVKLNREDLLRKQRTFDNGSIPHQIHLGELHAILRRQEDFYPFLKDNREKIEKILTFRIPYYVGPLARGNSRFAWMTRKSEETITPWNFEEVVDKGASAQSFIERMTNFDKNLPNEKVLPKHSLLYEYFTVYNELTKVKYVTEGMRKPAFLSGEQKKAIVDLLFKTNRKVTVKQLKEDYFKKIECFDSVEISGVEDRFNASLGTYHDLLKIIKDKDFLDNEENEDILEDIVLTLTLFEDREMIEERLKTYAHLFDDKVMKQLKRRRYTGWGRLSRKLINGIRDKQSGKTILDFLKSDGFANRNFMQLIHDDSLTFKEDIQKAQVSGQGDSLHEHIANLAGSPAIKKGILQTVKVVDELVKVMGRHKPENIVIEMARENQTTQKGQKNSRERMKRIEEGIKELGSQILKEHPVENTQLQNEKLYLYYLQNGRDMYVDQELDINRLSDYDVDHIVPQSFLKDDSIDNKVLTRSDKNRGKSDNVPSEEVVKKMKNYWRQLLNAKLITQRKFDNLTKAERGGLSELDKAGFIKRQLVETRQITKHVAQILDSRMNTKYDENDKLIREVKVITLKSKLVSDFRKDFQFYKVREINNYHHAHDAYLNAVVGTALIKKYPKLESEFVYGDYKVYDVRKMIAKSEQEIGKATAKYFFYSNIMNFFKTEITLANGEIRKRPLIETNGETGEIVWDKGRDFATVRKVLSMPQVNIVKKTEVQTGGFSKESILPKRNSDKLIARKKDWDPKKYGGFVSPTVAYSVLVVAKVEKGKSKKLKSVKELLGITIMERSSFEKNPIDFLEAKGYKEVKKDLIIKLPKYSLFELENGRKRMLASARELQKGNELALPSKYVNFLYLASHYEKLKGSPEDNEQKQLFVEQHKHYLDEIIEQISEFSKRVILADANLDKVLSAYNKHRDKPIREQAENIIHLFTLTNLGAPAAFKYFDTTIDRKQYRSTKEVLDATLIHQSITGLYETRIDLSQLGGDEGADKRTADGSEFESPKKKRKV

SEQ ID NO: 351 - protein, 1588 aa, synthetic construct
  REGION 1..1588: note = 11. monoABE8.1_bpNLS +Y147T_Q154R polypeptide sequence
MSEVEFSHEYWMRHALTLAKRARDEREVPVGAVLVLNNRVIGEGWNRAIGLHDPTAHAEIMALRQGGLVMQNYRLIDATLYVTFEPCVMCAGAMIHSRIGRVVFGVRNAKTGAAGSLMDVLHYPGMNHRVEITEGILADECAALLCTFFRMPRRVFNAQKKAQSSTDSGGSSGGSSGSETPGTSESATPESSGGSSGGSDKKYSIGLAIGTNSVGWAVITDEYKVPSKKFKVLGNTDRHSIKKNLIGALLFDSGETAEATRLKRTARRRYTRRKNRICYLQEIFSNEMAKVDDSFFHRLEESFLVEEDKKHERHPIFGNIVDEVAYHEKYPTIYHLRKKLVDSTDKADLRLIYLALAHMIKFRGHFLIEGDLNPDNSDVDKLFIQLVQTYNQLFEENPINASGVDAKAILSARLSKSRRLENLIAQLPGEKKNGLFGNLIALSLGLTPNFKSNFDLAEDAKLQLSKDTYDDDLDNLLAQIGDQYADLFLAAKNLSDAILLSDILRVNTEITKAPLSASMIKRYDEHHQDLTLLKALVRQQLPEKYKEIFFDQSKNGYAGYIDGGASQEEFYKFIKPILEKMDGTEELLVKLNREDLLRKQRTFDNGSIPHQIHLGELHAILRRQEDFYPFLKDNREKIEKILTFRIPYYVGPLARGNSRFAWMTRKSEETITPWNFEEVVDKGASAQSFIERMTNFDKNLPNEKVLPKHSLLYEYFTVYNELTKVKYVTEGMRKPAFLSGEQKKAIVDLLFKTNRKVTVKQLKEDYFKKIECFDSVEISGVEDRFNASLGTYHDLLKIIKDKDFLDNEENEDILEDIVLTLTLFEDREMIEERLKTYAHLFDDKVMKQLKRRRYTGWGRLSRKLINGIRDKQSGKTILDFLKSDGFANRNFMQLIHDDSLTFKEDIQKAQVSGQGDSLHEHIANLAGSPAIKKGILQTVKVVDELVKVMGRHKPENIVIEMARENQTTQKGQKNSRERMKRIEEGIKELGSQILKEHPVENTQLQNEKLYLYYLQNGRDMYVDQELDINRLSDYDVDHIVPQSFLKDDSIDNKVLTRSDKNRGKSDNVPSEEVVKKMKNYWRQLLNAKLITQRKFDNLTKAERGGLSELDKAGFIKRQLVETRQITKHVAQILDSRMNTKYDENDKLIREVKVITLKSKLVSDFRKDFQFYKVREINNYHHAHDAYLNAVVGTALIKKYPKLESEFVYGDYKVYDVRKMIAKSEQEIGKATAKYFFYSNIMNFFKTEITLANGEIRKRPLIETNGETGEIVWDKGRDFATVRKVLSMPQVNIVKKTEVQTGGFSKESILPKRNSDKLIARKKDWDPKKYGGFVSPTVAYSVLVVAKVEKGKSKKLKSVKELLGITIMERSSFEKNPIDFLEAKGYKEVKKDLIIKLPKYSLFELENGRKRMLASARELQKGNELALPSKYVNFLYLASHYEKLKGSPEDNEQKQLFVEQHKHYLDEIIEQISEFSKRVILADANLDKVLSAYNKHRDKPIREQAENIIHLFTLTNLGAPAAFKYFDTTIDRKQYRSTKEVLDATLIHQSITGLYETRIDLSQLGGDEGADKRTADGSEFESPKKKRKV

SEQ ID NO: 352 - protein, 1588 aa, synthetic construct
  REGION 1..1588: note = 12. monoABE8.1_bpNLS +Y147T_Q154S polypeptide sequence
MSEVEFSHEYWMRHALTLAKRARDEREVPVGAVLVLNNRVIGEGWNRAIGLHDPTAHAEIMALRQGGLVMQNYRLIDATLYVTFEPCVMCAGAMIHSRIGRVVFGVRNAKTGAAGSLMDVLHYPGMNHRVEITEGILADECAALLCTFFRMPRSVFNAQKKAQSSTDSGGSSGGSSGSETPGTSESATPESSGGSSGGSDKKYSIGLAIGTNSVGWAVITDEYKVPSKKFKVLGNTDRHSIKKNLIGALLFDSGETAEATRLKRTARRRYTRRKNRICYLQEIFSNEMAKVDDSFFHRLEESFLVEEDKKHERHPIFGNIVDEVAYHEKYPTIYHLRKKLVDSTDKADLRLIYLALAHMIKFRGHFLIEGDLNPDNSDVDKLFIQLVQTYNQLFEENPINASGVDAKAILSARLSKSRRLENLIAQLPGEKKNGLFGNLIALSLGLTPNFKSNFDLAEDAKLQLSKDTYDDDLDNLLAQIGDQYADLFLAAKNLSDAILLSDILRVNTEITKAPLSASMIKRYDEHHQDLTLLKALVRQQLPEKYKEIFFDQSKNGYAGYIDGGASQEEFYKFIKPILEKMDGTEELLVKLNREDLLRKQRTFDNGSIPHQIHLGELHAILRRQEDFYPFLKDNREKIEKILTFRIPYYVGPLARGNSRFAWMTRKSEETITPWNFEEVVDKGASAQSFIERMTNFDKNLPNEKVLPKHSLLYEYFTVYNELTKVKYVTEGMRKPAFLSGEQKKAIVDLLFKTNRKVTVKQLKEDYFKKIECFDSVEISGVEDRFNASLGTYHDLLKIIKDKDFLDNEENEDILEDIVLTLTLFEDREMIEERLKTYAHLFDDKVMKQLKRRRYTGWGRLSRKLINGIRDKQSGKTILDFLKSDGFANRNFMQLIHDDSLTFKEDIQKAQVSGQGDSLHEHIANLAGSPAIKKGILQTVKVVDELVKVMGRHKPENIVIEMARENQTTQKGQKNSRERMKRIEEGIKELGSQILKEHPVENTQLQNEKLYLYYLQNGRDMYVDQELDINRLSDYDVDHIVPQSFLKDDSIDNKVLTRSDKNRGKSDNVPSEEVVKKMKNYWRQLLNAKLITQRKFDNLTKAERGGLSELDKAGFIKRQLVETRQITKHVAQILDSRMNTKYDENDKLIREVKVITLKSKLVSDFRKDFQFYKVREINNYHHAHDAYLNAVVGTALIKKYPKLESEFVYGDYKVYDVRKMIAKSEQEIGKATAKYFFYSNIMNFFKTEITLANGEIRKRPLIETNGETGEIVWDKGRDFATVRKVLSMPQVNIVKKTEVQTGGFSKESILPKRNSDKLIARKKDWDPKKYGGFVSPTVAYSVLVVAKVEKGKSKKLKSVKELLGITIMERSSFEKNPIDFLEAKGYKEVKKDLIIKLPKYSLFELENGRKRMLASARELQKGNELALPSKYVNFLYLASHYEKLKGSPEDNEQKQLFVEQHKHYLDEIIEQISEFSKRVILADANLDKVLSAYNKHRDKPIREQAENIIHLFTLTNLGAPAAFKYFDTTIDRKQYRSTKEVLDATLIHQSITGLYETRIDLSQLGGDEGADKRTADGSEFESPKKKRKV

SEQ ID NO: 353 - protein, 1588 aa, synthetic construct
  REGION 1..1588: note = 13. monoABE8.1_bpNLS +H123Y123H_Y147R_Q154R_I76Y polypeptide sequence
MSEVEFSHEYWMRHALTLAKRARDEREVPVGAVLVLNNRVIGEGWNRAIGLHDPTAHAEIMALRQGGLVMQNYRLYDATLYVTFEPCVMCAGAMIHSRIGRVVFGVRNAKTGAAGSLMDVLHHPGMNHRVEITEGILADECAALLCRFFRMPRRVFNAQKKAQSSTDSGGSSGGSSGSETPGTSESATPESSGGSSGGSDKKYSIGLAIGTNSVGWAVITDEYKVPSKKFKVLGNTDRHSIKKNLIGALLFDSGETAEATRLKRTARRRYTRRKNRICYLQEIFSNEMAKVDDSFFHRLEESFLVEEDKKHERHPIFGNIVDEVAYHEKYPTIYHLRKKLVDSTDKADLRLIYLALAHMIKFRGHFLIEGDLNPDNSDVDKLFIQLVQTYNQLFEENPINASGVDAKAILSARLSKSRRLENLIAQLPGEKKNGLFGNLIALSLGLTPNFKSNFDLAEDAKLQLSKDTYDDDLDNLLAQIGDQYADLFLAAKNLSDAILLSDILRVNTEITKAPLSASMIKRYDEHHQDLTLLKALVRQQLPEKYKEIFFDQSKNGYAGYIDGGASQEEFYKFIKPILEKMDGTEELLVKLNREDLLRKQRTFDNGSIPHQIHLGELHAILRRQEDFYPFLKDNREKIEKILTFRIPYYVGPLARGNSRFAWMTRKSEETITPWNFEEVVDKGASAQSFIERMTNFDKNLPNEKVLPKHSLLYEYFTVYNELTKVKYVTEGMRKPAFLSGEQKKAIVDLLFKTNRKVTVKQLKEDYFKKIECFDSVEISGVEDRFNASLGTYHDLLKIIKDKDFLDNEENEDILEDIVLTLTLFEDREMIEERLKTYAHLFDDKVMKQLKRRRYTGWGRLSRKLINGIRDKQSGKTILDFLKSDGFANRNFMQLIHDDSLTFKEDIQKAQVSGQGDSLHEHIANLAGSPAIKKGILQTVKVVDELVKVMGRHKPENIVIEMARENQTTQKGQKNSRERMKRIEEGIKELGSQILKEHPVENTQLQNEKLYLYYLQNGRDMYVDQELDINRLSDYDVDHIVPQSFLKDDSIDNKVLTRSDKNRGKSDNVPSEEVVKKMKNYWRQLLNAKLITQRKFDNLTKAERGGLSELDKAGFIKRQLVETRQITKHVAQILDSRMNTKYDENDKLIREVKVITLKSKLVSDFRKDFQFYKVREINNYHHAHDAYLNAVVGTALIKKYPKLESEFVYGDYKVYDVRKMIAKSEQEIGKATAKYFFYSNIMNFFKTEITLANGEIRKRPLIETNGETGEIVWDKGRDFATVRKVLSMPQVNIVKKTEVQTGGFSKESILPKRNSDKLIARKKDWDPKKYGGFVSPTVAYSVLVVAKVEKGKSKKLKSVKELLGITIMERSSFEKNPIDFLEAKGYKEVKKDLIIKLPKYSLFELENGRKRMLASARELQKGNELALPSKYVNFLYLASHYEKLKGSPEDNEQKQLFVEQHKHYLDEIIEQISEFSKRVILADANLDKVLSAYNKHRDKPIREQAENIIHLFTLTNLGAPAAFKYFDTTIDRKQYRSTKEVLDATLIHQSITGLYETRIDLSQLGGDEGADKRTADGSEFESPKKKRKV

SEQ ID NO: 354 - protein, 1588 aa, synthetic construct
  REGION 1..1588: note = 14. monoABE8.1_bpNLS + V82S +Q154R polypeptide sequence
MSEVEFSHEYWMRHALTLAKRARDEREVPVGAVLVLNNRVIGEGWNRAIGLHDPTAHAEIMALRQGGLVMQNYRLIDATLYSTFEPCVMCAGAMIHSRIGRVVFGVRNAKTGAAGSLMDVLHYPGMNHRVEITEGILADECAALLCYFFRMPRRVFNAQKKAQSSTDSGGSSGGSSGSETPGTSESATPESSGGSSGGSDKKYSIGLAIGTNSVGWAVITDEYKVPSKKFKVLGNTDRHSIKKNLIGALLFDSGETAEATRLKRTARRRYTRRKNRICYLQEIFSNEMAKVDDSFFHRLEESFLVEEDKKHERHPIFGNIVDEVAYHEKYPTIYHLRKKLVDSTDKADLRLIYLALAHMIKFRGHFLIEGDLNPDNSDVDKLFIQLVQTYNQLFEENPINASGVDAKAILSARLSKSRRLENLIAQLPGEKKNGLFGNLIALSLGLTPNFKSNFDLAEDAKLQLSKDTYDDDLDNLLAQIGDQYADLFLAAKNLSDAILLSDILRVNTEITKAPLSASMIKRYDEHHQDLTLLKALVRQQLPEKYKEIFFDQSKNGYAGYIDGGASQEEFYKFIKPILEKMDGTEELLVKLNREDLLRKQRTFDNGSIPHQIHLGELHAILRRQEDFYPFLKDNREKIEKILTFRIPYYVGPLARGNSRFAWMTRKSEETITPWNFEEVVDKGASAQSFIERMTNFDKNLPNEKVLPKHSLLYEYFTVYNELTKVKYVTEGMRKPAFLSGEQKKAIVDLLFKTNRKVTVKQLKEDYFKKIECFDSVEISGVEDRFNASLGTYHDLLKIIKDKDFLDNEENEDILEDIVLTLTLFEDREMIEERLKTYAHLFDDKVMKQLKRRRYTGWGRLSRKLINGIRDKQSGKTILDFLKSDGFANRNFMQLIHDDSLTFKEDIQKAQVSGQGDSLHEHIANLAGSPAIKKGILQTVKVVDELVKVMGRHKPENIVIEMARENQTTQKGQKNSRERMKRIEEGIKELGSQILKEHPVENTQLQNEKLYLYYLQNGRDMYVDQELDINRLSDYDVDHIVPQSFLKDDSIDNKVLTRSDKNRGKSDNVPSEEVVKKMKNYWRQLLNAKLITQRKFDNLTKAERGGLSELDKAGFIKRQLVETRQITKHVAQILDSRMNTKYDENDKLIREVKVITLKSKLVSDFRKDFQFYKVREINNYHHAHDAYLNAVVGTALIKKYPKLESEFVYGDYKVYDVRKMIAKSEQEIGKATAKYFFYSNIMNFFKTEITLANGEIRKRPLIETNGETGEIVWDKGRDFATVRKVLSMPQVNIVKKTEVQTGGFSKESILPKRNSDKLIARKKDWDPKKYGGFVSPTVAYSVLVVAKVEKGKSKKLKSVKELLGITIMERSSFEKNPIDFLEAKGYKEVKKDLIIKLPKYSLFELENGRKRMLASARELQKGNELALPSKYVNFLYLASHYEKLKGSPEDNEQKQLFVEQHKHYLDEIIEQISEFSKRVILADANLDKVLSAYNKHRDKPIREQAENIIHLFTLTNLGAPAAFKYFDTTIDRKQYRSTKEVLDATLIHQSITGLYETRIDLSQLGGDEGADKRTADGSEFESPKKKRKV

SEQ ID NO: 355 - protein, 4 aa, synthetic construct
  REGION 1..4: note = synthetic peptide sequence
SGGS

SEQ ID NO: 356 - protein, 24 aa, synthetic construct
  REGION 1..24: note = synthetic peptide sequence
SGGSSGSETPGTSESATPESSGGS

SEQ ID NO: 357 - protein, 32 aa, synthetic construct
  REGION 1..32: note = synthetic polypeptide sequence
SGGSSGGSSGSETPGTSESATPESSGGSSGGS

SEQ ID NO: 358 - protein, 104 aa, synthetic construct
  REGION 1..104: note = synthetic polypeptide sequence
GGSGGSPGSPAGSPTSTEEGTSESATPESGPGTSTEPSEGSAPGSPAGSPTSTEEGTSTEPSEGSAPGTSTEPSEGSAPGTSESATPESGPGSEPATSGGSGGS

SEQ ID NO: 359 - protein, 24 aa, synthetic construct
  REGION 1..24: note = synthetic peptide sequence
SGGSSGGSSGSETPGTSESATPES

SEQ ID NO: 360 - protein, 40 aa, synthetic construct
  REGION 1..40: note = synthetic polypeptide sequence
SGGSSGGSSGSETPGTSESATPESSGGSSGGSSGGSSGGS

SEQ ID NO: 361 - protein, 64 aa, synthetic construct
  REGION 1..64: note = synthetic polypeptide sequence
SGGSSGGSSGSETPGTSESATPESSGGSSGGSSGGSSGGSSGSETPGTSESATPESSGGSSGGS

SEQ ID NO: 362 - protein, 92 aa, synthetic construct
  REGION 1..92: note = synthetic polypeptide sequence
PGSPAGSPTSTEEGTSESATPESGPGTSTEPSEGSAPGSPAGSPTSTEEGTSTEPSEGSAPGTSTEPSEGSAPGTSESATPESGPGSEPATS

SEQ ID NO: 363 - protein, 5 aa, synthetic construct
  REGION 1..5: note = synthetic peptide sequence
PAPAP

SEQ ID NO: 364 - protein, 6 aa, synthetic construct
  REGION 1..6: note = synthetic peptide sequence
PAPAPA

SEQ ID NO: 365 - protein, 7 aa, synthetic construct
  REGION 1..7: note = synthetic peptide sequence
PAPAPAP

SEQ ID NO: 366 - protein, 8 aa, synthetic construct
  REGION 1..8: note = synthetic peptide sequence
PAPAPAPA

SEQ ID NO: 367 - protein, 9 aa, synthetic construct
  REGION 1..9: note = synthetic peptide sequence
PAPAPAPAP

SEQ ID NO: 368 - protein, 15 aa, synthetic construct
  REGION 1..15: note = synthetic peptide sequence
PAPAPAPAPAPAPAP

SEQ ID NO: 369 - protein, 21 aa, synthetic construct
  REGION 1..21: note = synthetic peptide sequence
PAPAPAPAPAPAPAPAPAPAP

SEQ ID NO: 370 - DNA, 306 bp, synthetic construct
  misc_feature 1..306: note = DnaE Intein-N polynucleotide sequence
  source 1..306: mol_type = other DNA
tgcctgtcatacgaaaccgagatactgacagtagaatatggccttctgccaatcgggaagattgtggagaaacggatagaatgcacagtttactctgtcgataacaatggtaacatttatactcagccagttgcccagtggcacgaccggggagagcaggaagtattcgaatactgtctggaggatggaagtctcattagggccactaaggaccacaaatttatgacagtcgatggccagatgctgcctatagacgaaatctttgagcgagagttggacctcatgcgagttgacaaccttcctaat

SEQ ID NO: 371 - protein, 102 aa, synthetic construct
  REGION 1..102: note = DnaE Intein-N polypeptide sequence
CLSYETEILTVEYGLLPIGKIVEKRIECTVYSVDNNGNIYTQPVAQWHDRGEQEVFEYCLEDGSLIRATKDHKFMTVDGQMLPIDEIFERELDLMRVDNLPN

SEQ ID NO: 372 - DNA, 108 bp, synthetic construct
  misc_feature 1..108: note = DnaE Intein-C polynucleotide sequence
  source 1..108: mol_type = other DNA
atgatcaagatagctacaaggaagtatcttggcaaacaaaacgtttatgatattggagtcgaaagagatcacaactttgctctgaagaacggattcatagcttctaat

SEQ ID NO: 373 - protein, 36 aa, synthetic construct
  REGION 1..36: note = DnaE Intein-C polypeptide sequence
MIKIATRKYLGKQNVYDIGVERDHNFALKNGFIASN

SEQ ID NO: 374 - DNA, 303 bp, synthetic construct
  misc_feature 1..303: note = Cfa-N polynucleotide sequence
  source 1..303: mol_type = other DNA
tgcctgtcttatgataccgagatacttaccgttgaatatggcttcttgcctattggaaagattgtcgaagagagaattgaatgcacagtatatactgtagacaagaatggtttcgtttacacacagcccattgctcaatggcacaatcgcggcgaacaagaagtatttgagtactgtctcgaggatggaagcatcatacgagcaactaaagatcataaattcatgaccactgacgggcagatgttgccaatagatgagatattcgagcggggcttggatctcaaacaagtggatggattgcca

SEQ ID NO: 375 - protein, 101 aa, synthetic construct
  REGION 1..101: note = Cfa-N polypeptide sequence
CLSYDTEILTVEYGFLPIGKIVEERIECTVYTVDKNGFVYTQPIAQWHNRGEQEVFEYCLEDGSIIRATKDHKFMTTDGQMLPIDEIFERGLDLKQVDGLP

SEQ ID NO: 376 - DNA, 159 bp, synthetic construct
  misc_feature 1..159: note = Cfa-C polynucleotide sequence
  source 1..159: mol_type = other DNA
atgaagaggactgccgatggatcagagtttgaatctcccaagaagaagaggaaagtaaagataatatctcgaaaaagtcttggtacccaaaatgtctatgatattggagtggagaaagatcacaacttccttctcaagaacggtctcgtagccagcaac

SEQ ID NO: 377 - protein, 53 aa, synthetic construct
  REGION 1..53: note = Cfa-C polypeptide sequence
MKRTADGSEFESPKKKRKVKIISRKSLGTQNVYDIGVEKDHNFLLKNGLVASN

SEQ ID NO: 378 - protein, 1081 aa, Neisseria meningitidis
  REGION 1..1081: note = MISC_FEATURE - Nme3Cas9; WP_002217928.1 type II CRISPR RNA-guided endonuclease Cas9 [Neisseria meningitidis]
  REGION 1..1081: note = MISC_FEATURE - NCBI Reference: WP_002217928.1; type II CRISPR RNA-guided endonuclease Cas9; Nme3Cas9 polypeptide sequence
MAAFKPNPINYILGLDIGIASVGWAMVEIDEEENPIRLIDLGVRVFERAEVPKTGDSLAMARRLARSVRRLTRRRAHRLLRARRLLKREGVLQAADFDENGLIKSLPNTPWQLRAAALDRKLTPLEWSAVLLHLIKHRGYLSQRKNEGETADKELGALLKGVADNAHALQTGDFRTPAELALNKFEKECGHIRNQRGDYSHTFSRKDLQAELNLLFEKQKEFGNPHVSGGLKEGIETLLMTQRPALSGDAVQKMLGHCTFEPAEPKAAKNTYTAERFIWLTKLNNLRILEQGSERPLTDTERATLMDEPYRKSKLTYAQARKLLSLEDTAFFKGLRYGKDNAEASTLMEMKAYHTISRALEKEGLKDKKSPLNLSPELQDEIGTAFSLFKTDEDITGRLKDRIQPEILEALLKHISFDKFVQISLKALRRIVPLMEQGKRYDEACAEIYGDHYGKKNTEEKIYLPPIPADEIRNPVVLRALSQARKVINGVVRRYGSPARIHIETAREVGKSFKDRKEIEKRQEENRKDREKAAAKFREYFPNFVGEPKSKDILKLRLYEQQHGKCLYSGKEINLGRLNEKGYVEIDHALPFSRTWDDSFNNKVLVLGSENQNKGNQTPYEYFNGKDNSREWQEFKARVETSRFPRSKKQRILLQKFDEDGFKERNLNDTRYVNRFLCQFVADRMRLTGKGKKRVFASNGQITNLLRGFWGLRKVRAENDRHHALDAVVVACSTVAMQQKITRFVRYKEMNAFDGKTIDKETGEVLHQKTHFPQPWEFFAQEVMIRVFGKPDGKPEFEEADTPEKLRTLLAEKLSSRPEAVHEYVTPLFVSRAPNRKMSGQGHMETVKSAKRLDEGVSVLRVPLTQLKLKDLEKMVNREREPKLYEALKARLEAHKDDPAKAFAEPFYKYDKAGNRTQQVKAVRVEQVQKTGVWVRNHNGIADNATMVRVDVFEKGDKYYLVPIYSWQVAKGILPDRAVVAYADEEDWTVIDESFRFKFVLYSNDLIKVQLKKDSFLGYFSGLDRATGAISLREHDLEKSKGKDGMHRIGVKTALSFQKYQIDEMGKEIRPCRLKKRPPVR

SEQ ID NO: 379 - RNA, 66 nt, synthetic construct
  misc_feature 1..66: note = Telomerase Ku Binding Motif oligonucleotide sequence
  source 1..66: mol_type = other RNA
ttcttgtcgtacttatagatcgctacgttatttcaattttgaaaatctgagtcctgggagtgcgga

SEQ ID NO: 380 - protein, 1094 aa, synthetic construct
  REGION 1..1094: note = Telomerase Ku Heterodimer polypeptide sequence
MSGWESYYKTEGDEEAEEEQEENLEASGDYKYSGRDSLIFLVDASKAMFESQSEDELTPFDMSIQCIQSVYISKIISSDRDLLAVVFYGTEKDKNSVNFKNIYVLQELDNPGAKRILELDQFKGQQGQKRFQDMMGHGSDYSLSEVLWVCANLFSDVQFKMSHKRIMLFTNEDNPHGNDSAKASRARTKAGDLRDTGIFLDLMHLKKPGGFDISLFYRDIISIAEDEDLRVHFEESSKLEDLLRKVRAKETRKRALSRLKLKLNKDIVISVGIYNLVQKALKPPPIKLYRETNEPVKTKTRTFNTSTGGLLLPSDTKRSQIYGSRQIILEKEETEELKRFDDPGLMLMGFKPLVLLKKHHYLRPSLFVYPEESLVIGSSTLFSALLIKCLEKEVAALCRYTPRRNIPPYFVALVPQEEELDDQKIQVTPPGFQLVFLPFADDKRKMPFTEKIMATPEQVGKMKAIVEKLRFTYRSDSFENPVLQQHFRNLEALALDLMEPEQAVDLTLPKVEAMNKRLGSLVDEFKELVYPPDYNPEGKVTKRKHDNEGSGSKRPKVEYSEEELKTHISKGTLGKFTVPMLKEACRAYGLKSGLKKQELLEALTKHFQDMVRSGNKAAVVLCMDVGFTMSNSIPGIESPFEQAKKVITMFVQRQVFAENKDEIALVLFGTDGTDNPLSGGDQYQNITVHRHLMLPDFDLLEDIESKIQPGSQQADFLDALIVSMDVIQHETIGKKFEKRHIEIFTDLSSRFSKSQLDIIIHSLKKCDISERHSIHWPCRLTIGSNLSIRIAAYKSILQERVKKTWTVVDAKTLKKEDIQKETVYCLNDDDETEVLKEDIIQGFRYGSDIVPFSKVDEEQMKYKSEGKCFSVLGFCKSSQVQRRFFMGNQVLKVFAARDDEAAAVALSSLIHALDDLDMVAIVRYAYDKRANPQVGVAFPHIKHNYECLVYVQLPFMEDLRQYMFSSLKNSKKYAPTEAQLNAVDALIDSMSLAKKDEKTDTLEDLFPTTKIPNPRFQRLFQCLLHRALHPREPLPPIQQHIWNMLNPPAEVTTKSQIPLSKIKTLFPLIEAKKKDQVTAQEIFQDNHEDGPTAK

SEQ ID NO: 381 - RNA, 10 nt, synthetic construct
  misc_feature 1..10: note = Telomerase Sm7 consensus site(single stranded) oligonucleotide sequence
  source 1..10: mol_type = other RNA
aatttttgga

SEQ ID NO: 382 - protein, 83 aa, synthetic construct
  REGION 1..83: note = MS2 coat protein polypeptide sequence
GSVIDVSSQRVNVQRPLDALGNSLNSPVIIKLKGDREFRGVLKSFDLHMNLVLNDAEELEDGEVTRRLGTVLIRGDNIVYISP

SEQ ID NO: 383 - RNA, 26 nt, synthetic construct
  misc_feature 1..26: note = PP7 phage operator stem loop oligonucleotide sequence
  source 1..26: mol_type = other RNA
ataaggagtttatatggaaaccctta

SEQ ID NO: 384 - protein, 128 aa, synthetic construct
  REGION 1..128: note = PP7 coat protein (PCP)polypeptide sequence
MSKTIVLSVGEATRTLTEIQSTADRQIFEEKVGPLVGRLRLTASLRQNGAKTAYRVNLKLDQADVVDCSTSVCGELPKVRYTQVWSHDVTIVANSTEASRKSLYDLTKSLVATSQVEDLVVNLVPLGR

SEQ ID NO: 385 - RNA, 19 nt, synthetic construct
  misc_feature 1..19: note = SfMu Com stem loop oligonucleotide sequence
  source 1..19: mol_type = other RNA
ctgaatgcctgcgagcatc

SEQ ID NO: 386 - protein, 62 aa, synthetic construct
  REGION 1..62: note = SfMu Com binding protein polypeptide sequence
MKSIRCKNCNKLLFKADSFDHIEIRCPRCKRHIIMLNACEHPTEKHCGKREKITHSDETVRY

SEQ ID NO: 387 - protein, 47 aa, synthetic construct
  REGION 1..47: note = leucine zipper polypeptide sequence
LEIRAAFLRQRNTALRTEVAELEQEVQRLENEVSQYETRYGPLGGGK

SEQ ID NO: 388 - protein, 47 aa, synthetic construct
  REGION 1..47: note = leucine zipper polypeptide sequence
LEIEAAFLERENTALETRVAELRQRVQRLRNRVSQYRTRYGPLGGGK

SEQ ID NO: 389 - DNA, 303 bp, synthetic construct
  source 1..303: mol_type = other DNA
tgcctgagctacgataccgagatcctgaccgtggaatacggcttcctgcctatcggcaagatcgtcgaggaacggatcgagtgcacagtgtacaccgtggataagaatggcttcgtgtacacccagcctatcgctcagtggcacaacagaggcgagcaagaggtgttcgagtactgcctggaagatggcagcatcatccgggccaccaaggaccacaagtttatgaccaccgacggccagatgctgcccatcgacgagatctttgagagaggcctggacctgaaacaggtggacggactgcct

SEQ ID NO: 390 - protein, 101 aa, synthetic construct; identical to SEQ ID NO: 375

SEQ ID NO: 391 - DNA, 264 bp, synthetic construct
  source 1..264: mol_type = other DNA
tgtctggacctcaagacccaagtgcagacacctcagggcatgaaagagattagcaatatccaggtgggcgacctggtcctgagcaacaccggctacaacgaggtgctgaacgtgttccctaagtccaagaagaaatcttataagatcaccctggaagatggcaaggaaatcatctgcagcgaggaacacctgttccccacccagaccggcgagatgaacatcagcggcggactgaaggagggcatgtgcctgtacgtgaaggag

SEQ ID NO: 392 - protein, 88 aa, synthetic construct
CLDLKTQVQTPQGMKEISNIQVGDLVLSNTGYNEVLNVFPKSKKKSYKITLEDGKEIICSEEHLFPTQTGEMNISGGLKEGMCLYVKE

SEQ ID NO: 393 - DNA, 267 bp, synthetic construct
  source 1..267: mol_type = other DNA
tgcctgagcctggacaccatggtggtgacaaacggcaaggccatcgagatcagagatgtgaaggtgggagattggctggaaagcgaatgtggcccagtgcaggttacagaggtgctgcctatcatcaagcagcctgtctttgagattgtgctgaaaagcggaaaaaagatccgggtgtccgctaatcacaagttccccaccaaggacggcctcaagaccatcaacagcggcctgaaggtgggcgacttcctgagaagcagagccaag

SEQ ID NO: 394 - protein, 89 aa, synthetic construct
CLSLDTMVVTNGKAIEIRDVKVGDWLESECGPVQVTEVLPIIKQPVFEIVLKSGKKIRVSANHKFPTKDGLKTINSGLKVGDFLRSRAK

SEQ ID NO: 395 - DNA, 303 bp, synthetic construct
  source 1..303: mol_type = other DNA
tgttttgtgcctggcaccctggtgaacacagagaatggcctgaagaaaatcgaggaaatcaaggtgggcgacaaggtgttcagccatacaggcaagctgcaggaggtggtggacaccctgatcttcgaccgggacgaggaaatcatctctatcaacggcattgattgcaccaagaaccacgagttctacgtgatcgataaggaaaacgctaatagagtgaacgaggacaacatccacctcttcgccagatgggtccacgccgaggaactggatatgaaaaagcacctgctgatcgagctggaa

SEQ ID NO: 396 - protein, 101 aa, synthetic construct
CFVPGTLVNTENGLKKIEEIKVGDKVFSHTGKLQEVVDTLIFDRDEEIISINGIDCTKNHEFYVIDKENANRVNEDNIHLFARWVHAEELDMKKHLLIELE

SEQ ID NO: 397 - DNA, 315 bp, synthetic construct
  source 1..315: mol_type = other DNA
tgcctggtgggctctagcgagattatcacaagaaactacggcaagaccaccatcaaggaagtggtcgagatcttcgacaacgacaagaatatccaggtgctggccttcaacacccacaccgataatatcgagtgggcccctatcaaggccgctcagctgaccagacctaacgccgagctggttgaactggaaatcgacaccctgcacggcgtgaaaacaatccggtgcacccctgaccaccccgtgtacaccaagaacagaggctacgtgcgggccgacgagctgacagatgatgacgagctcgtggtggctatc

SEQ ID NO: 398 - protein, 105 aa, synthetic construct
CLVGSSEIITRNYGKTTIKEVVEIFDNDKNIQVLAFNTHTDNIEWAPIKAAQLTRPNAELVELEIDTLHGVKTIRCTPDHPVYTKNRGYVRADELTDDDELVVAI

SEQ ID NO: 399 - DNA, 306 bp, synthetic construct
  source 1..306: mol_type = other DNA
tgcctgagctacgagacagagatcctgaccgtggaatatggcctgctgccaatcggaaagatcgtggaaaagcggatcgagtgcaccgtctacagcgtggacaacaacggaaatatctatacacagcctgtggcccaatggcacgaccggggcgaacaggaggtgtttgagtactgcctggaagatggttctctgattagagccaccaaggaccacaagttcatgaccgtcgacggccagatgctgcccatcgacgaaatcttcgagcgggaactcgacctgatgagagtggataacctgcccaat

SEQ ID NO: 400 - protein, 102 aa, synthetic construct; identical to SEQ ID NO: 371

SEQ ID NO: 401 - protein, 101 aa, synthetic construct; identical to SEQ ID NO: 375

SEQ ID NO: 402 - protein, 102 aa, synthetic construct; identical to SEQ ID NO: 371

SEQ ID NO: 403 - DNA, 279 bp, synthetic construct
  source 1..279: mol_type = other DNA
acaagaagcggatactgtctggacctcaagacccaagtgcagacacctcagggcatgaaagagattagcaatatccaggtgggcgacctggtcctgagcaacaccggctacaacgaggtgctgaacgtgttccctaagtccaagaagaaatcttataagatcaccctggaagatggcaaggaaatcatctgcagcgaggaacacctgttccccacccagaccggcgagatgaacatcagcggcggactgaaggagggcatgtgcctgtacgtgaaggag

SEQ ID NO: 404 - protein, 93 aa, synthetic construct
TRSGYCLDLKTQVQTPQGMKEISNIQVGDLVLSNTGYNEVLNVFPKSKKKSYKITLEDGKEIICSEEHLFPTQTGEMNISGGLKEGMCLYVKE

SEQ ID NO: 405 - DNA, 282 bp, synthetic construct
  source 1..282: mol_type = other DNA
tctcagctgaaccggtgcctgagcctggacaccatggtggtgacaaacggcaaggccatcgagatcagagatgtgaaggtgggagattggctggaaagcgaatgtggcccagtgcaggttacagaggtgctgcctatcatcaagcagcctgtctttgagattgtgctgaaaagcggaaaaaagatccgggtgtccgctaatcacaagttccccaccaaggacggcctcaagaccatcaacagcggcctgaaggtgggcgacttcctgagaagcagagccaag

SEQ ID NO: 406 - protein, 94 aa, synthetic construct
SQLNRCLSLDTMVVTNGKAIEIRDVKVGDWLESECGPVQVTEVLPIIKQPVFEIVLKSGKKIRVSANHKFPTKDGLKTINSGLKVGDFLRSRAK

SEQ ID NO: 407 - DNA, 318 bp, synthetic construct
  source 1..318: mol_type = other DNA
ggcatcggcggaggatgttttgtgcctggcaccctggtgaacacagagaatggcctgaagaaaatcgaggaaatcaaggtgggcgacaaggtgttcagccatacaggcaagctgcaggaggtggtggacaccctgatcttcgaccgggacgaggaaatcatctctatcaacggcattgattgcaccaagaaccacgagttctacgtgatcgataaggaaaacgctaatagagtgaacgaggacaacatccacctcttcgccagatgggtccacgccgaggaactggatatgaaaaagcacctgctgatcgagctggaa

SEQ ID NO: 408 - protein, 106 aa, synthetic construct
GIGGGCFVPGTLVNTENGLKKIEEIKVGDKVFSHTGKLQEVVDTLIFDRDEEIISINGIDCTKNHEFYVIDKENANRVNEDNIHLFARWVHAEELDMKKHLLIELE

SEQ ID NO: 409 - DNA, 330 bp, synthetic construct
  source 1..330: mol_type = other DNA
ggaacaaacccatgttgcctggtgggctctagcgagattatcacaagaaactacggcaagaccaccatcaaggaagtggtcgagatcttcgacaacgacaagaatatccaggtgctggccttcaacacccacaccgataatatcgagtgggcccctatcaaggccgctcagctgaccagacctaacgccgagctggttgaactggaaatcgacaccctgcacggcgtgaaaacaatccggtgcacccctgaccaccccgtgtacaccaagaacagaggctacgtgcgggccgacgagctgacagatgatgacgagctcgtggtggctatc

SEQ ID NO: 410 - protein, 110 aa, synthetic construct
GTNPCCLVGSSEIITRNYGKTTIKEVVEIFDNDKNIQVLAFNTHTDNIEWAPIKAAQLTRPNAELVELEIDTLHGVKTIRCTPDHPVYTKNRGYVRADELTDDDELVVAI

SEQ ID NO: 411 - DNA, 105 bp, synthetic construct
  source 1..105: mol_type = other DNA
gtcaagatcatcagcagaaagagcctgggcacccagaacgtgtacgatatcggagtgggcgagccccacaactttctgctcaagaatggcctggtggccagcaac

SEQ ID NO: 412 - protein, 35 aa, synthetic construct
VKIISRKSLGTQNVYDIGVGEPHNFLLKNGLVASN

SEQ ID NO: 413 - DNA, 114 bp, synthetic construct
  source 1..114: mol_type = other DNA
atgatgctgaaaaagatcctgaagatcgaggaactggatgagagagagctgatcgacatcgaagtgtctggcaatcacctgttctacgccaacgacatcctgacccacaacagc

SEQ ID NO: 414 - protein, 38 aa, synthetic construct
MMLKKILKIEELDERELIDIEVSGNHLFYANDILTHNS

SEQ ID NO: 415 - DNA, 138 bp, synthetic construct
  source 1..138: mol_type = other DNA
atgtgcgaaatcttcgagaacgagattgattgggacgaaatcgcctctatcgagtacgtgggcgtggaagagacaatcgacatcaacgtgaccaacgacagactgtttttcgccaatggcatcctgacccacaacagc

SEQ ID NO: 416 - protein, 46 aa, synthetic construct
MCEIFENEIDWDEIASIEYVGVEETIDINVTNDRLFFANGILTHNS

SEQ ID NO: 417 - DNA, 123 bp, synthetic construct
  source 1..123: mol_type = other DNA
atgaaattcaagctgaaggaaatcaccagcatcgagacaaagcactacaagggcaaggtgcacgatctgaccgtgaaccaggaccacagctacaacgtcagaggcaccgtggtgcataattct

SEQ ID NO: 418 - protein, 41 aa, synthetic construct
MKFKLKEITSIETKHYKGKVHDLTVNQDHSYNVRGTVVHNS

SEQ ID NO: 419 - DNA, 123 bp, synthetic construct
  source 1..123: mol_type = other DNA
atggaagccaagacctacatcggcaagctgaaatctagaaagatcgtgtccaacgaggatacatacgacatccagaccagcacccacaatttcttcgccaacgacatcctggtgcacaacagc

SEQ ID NO: 420 - protein, 41 aa, synthetic construct
MEAKTYIGKLKSRKIVSNEDTYDIQTSTHNFFANDILVHNS

SEQ ID NO: 421 - DNA, 108 bp, synthetic construct
  source 1..108: mol_type = other DNA
atgatcaagatcgccacaagaaagtacctgggcaagcagaacgtgtacgacatcggcgtggagagagaccacaacttcgccctgaagaacggctttatcgcctctaat

SEQ ID NO: 422 - protein, 36 aa, synthetic construct; identical to SEQ ID NO: 373

SEQ ID NO: 423 - protein, 36 aa, synthetic construct
MVKIISRKSLGTQNVYDIGVGEPHNFLLKNGLVASN

SEQ ID NO: 424 - protein, 35 aa, synthetic construct
IKIATRKYLGKQNVYDIGVERDHNFALKNGFIASN

SEQ ID NO: 425 - DNA, 88 bp, synthetic construct
  source 1..88: mol_type = other DNA; note = SaCas9 scaffold sequence
gttttagtactctgtaatgaaaattacagaatctactaaaacaaggcaaaatgccgtgtttatctcgtcaacttgttggcgagatttt

SEQ ID NO: 426 - RNA, 20 nt, synthetic construct
  source 1..20: mol_type = other RNA
aagggccaaggtattgtggc

SEQ ID NO: 427 - RNA, 21 nt, synthetic construct
  source 1..21: mol_type = other RNA
agggccaaggtattgtggcag

SEQ ID NO: 428 - RNA, 20 nt, synthetic construct
  source 1..20: mol_type = other RNA
ccaaggtattgtggcagcaa

SEQ ID NO: 429 - RNA, 20 nt, synthetic construct
  source 1..20: mol_type = other RNA
gaagggccaaggtattgtgg

SEQ ID NO: 430 - RNA, 20 nt, synthetic construct
  source 1..20: mol_type = other RNA
gagaagggccaaggtattgt

SEQ ID NO: 431 - RNA, 20 nt, synthetic construct
  source 1..20: mol_type = other RNA
gccaaggtattgtggcagca

SEQ ID NO: 432 - RNA, 20 nt, synthetic construct
  source 1..20: mol_type = other RNA
ggccaaggtattgtggcagc

SEQ ID NO: 433 - RNA, 20 nt, synthetic construct
  source 1..20: mol_type = other RNA
gggccaaggtattgtggcag

SEQ ID NO: 434 - RNA, 20 nt, synthetic construct
  source 1..20: mol_type = other RNA
tgagaagggccaaggtattg

SEQ ID NO: 435 - RNA, 100 nt, synthetic construct
  source 1..100: mol_type = other RNA
aagggccaaggtattgtggcgttttagagctagaaatagcaagttaaaataaggctagtccgttatcaacttgaaaaagtggcaccgagtcggtgctttt

SEQ ID NO: 436 - RNA, 109 nt, synthetic construct
  source 1..109: mol_type = other RNA
agggccaaggtattgtggcaggttttagtactctgtaatgaaaattacagaatctactaaaacaaggcaaaatgccgtgtttatctcgtcaacttgttggcgagatttt

SEQ ID NO: 437 - RNA, 100 nt, synthetic construct
  source 1..100: mol_type = other RNA
ccaaggtattgtggcagcaagttttagagctagaaatagcaagttaaaataaggctagtccgttatcaacttgaaaaagtggcaccgagtcggtgctttt

SEQ ID NO: 438 - RNA, 100 nt, synthetic construct
  source 1..100: mol_type = other RNA
gaagggccaaggtattgtgggttttagagctagaaatagcaagttaaaataaggctagtccgttatcaacttgaaaaagtggcaccgagtcggtgctttt

SEQ ID NO: 439 - RNA, 100 nt, synthetic construct
  source 1..100: mol_type = other RNA
gagaagggccaaggtattgtgttttagagctagaaatagcaagttaaaataaggctagtccgttatcaacttgaaaaagtggcaccgagtcggtgctttt

SEQ ID NO: 440 - RNA, 100 nt, synthetic construct
  source 1..100: mol_type = other RNA
gccaaggtattgtggcagcagttttagagctagaaatagcaagttaaaataaggctagtccgttatcaacttgaaaaagtggcaccgagtcggtgctttt

SEQ ID NO: 441 - RNA, 100 nt, synthetic construct
  source 1..100: mol_type = other RNA
ggccaaggtattgtggcagcgttttagagctagaaatagcaagttaaaataaggctagtccgttatcaacttgaaaaagtggcaccgagtcggtgctttt

SEQ ID NO: 442 - RNA, 100 nt, synthetic construct
  source 1..100: mol_type = other RNA
gggccaaggtattgtggcaggttttagagctagaaatagcaagttaaaataaggctagtccgttatcaacttgaaaaagtggcaccgagtcggtgctttt

SEQ ID NO: 443 - RNA, 100 nt, synthetic construct
  source 1..100: mol_type = other RNA
tgagaagggccaaggtattggttttagagctagaaatagcaagttaaaataaggctagtccgttatcaacttgaaaaagtggcaccgagtcggtgctttt

SEQ ID NO: 444 - protein, 1588 aa, synthetic construct
MSEVEFSHEYWMRHALTLAKRARDEREVPVGAVLVLNNRVIGEGWNRAIGLHDPTAHAEIMALRQGGLVMQNYRLYDATLYSTFEPCVMCAGAMIHSRIGRVVFGVRNAKTGAAGSLMDVLHHPGMNHRVEITEGILADECAALLCRFFRMPRRVFNAQKKAQSSTDSGGSSGGSSGSETPGTSESATPESSGGSSGGSDKKYSIGLAIGTNSVGWAVITDEYKVPSKKFKVLGNTDRHSIKKNLIGALLFDSGETAEATRLKRTARRRYTRRKNRICYLQEIFSNEMAKVDDSFFHRLEESFLVEEDKKHERHPIFGNIVDEVAYHEKYPTIYHLRKKLVDSTDKADLRLIYLALAHMIKFRGHFLIEGDLNPDNSDVDKLFIQLVQTYNQLFEENPINASGVDAKAILSARLSKSRRLENLIAQLPGEKKNGLFGNLIALSLGLTPNFKSNFDLAEDAKLQLSKDTYDDDLDNLLAQIGDQYADLFLAAKNLSDAILLSDILRVNTEITKAPLSASMVKRYDEHHQDLTLLKALVRQQLPEKYKEIFFDQSKNGYAGYIDGGASQEEFYKFIKPILEKMDGTEELLVKLNREDLLRKQRTFDNGIIPHQIHLGELHAILRRQGDFYPFLKDNREKIEKILTFRIPYYVGPLARGNSRFAWMTRKSEETITPWNFEEVVDKGASAQSFIERMTNFDKNLPNEKVLPKHSLLYEYFTVYNELTKVKYVTEGMRKPAFLSGEQKKAIVDLLFKTNRKVTVKQLKEDYFKKIECFDSVEISGVEDRFNASLGTYHDLLKIIKDKDFLDNEENEDILEDIVLTLTLFEDREMIEERLKTYAHLFDDKVMKQLKRLRYTGWGRLSRKLINGIRDKQSGKTILDFLKSDGFANRNFMQLIHDDSLTFKEDIQKAQVSGQGDSLHEHIANLAGSPAIKKGILQTVKVVDELVKVMGGHKPENIVIEMARENQTTQKGQKNSRERMKRIEEGIKELGSQILKEHPVENTQLQNEKLYLYYLQNGRDMYVDQELDINRLSDYDVDHIVPQSFLKDDSIDNKVLTRSDKNRGKSDNVPSEEVVKKMKNYWRQLLNAKLITQRKFDNLTKAERGGLSELDKAGFIKRQLVETRQITKHVAQILDSRMNTKYDENDKLIREVKVITLKSKLVSDFRKDFQFYKVREINNYHHAHDAYLNAVVGTALIKKYPKLESEFVYGDYKVYDVRKMIAKSEQEIGKATAKYFFYSNIMNFFKTEITLANGEIRKRPLIETNGETGEIVWDKGRDFATVRKVLSMPQVNIVKKTEVQTGGFSKESILPKGNSDKLIARKKDWDPKKYGGFNSPTVAYSVLVVAKVEKGKSKKLKSVKELLGITIMERSSFEKNPIDFLEAKGYKEVKKDLIIKLPKYSLFELENGRKRMLASAGVLQKGNELALPSKYVNFLYLASHYEKLKGSPEDNEQKQLFVEQHKHYLDEIIEQISEFSKRVILADANLDKVLSAYNKHRDKPIREQAENIIHLFTLTNLGAPAAFKYFDTTINRKQYNTTKEVLDATLIRQSITGLYETRIDLSQLGGDEGADKRTADGSEFESPKKKRKV

SEQ ID NO: 445 - protein, 1606 aa, synthetic construct
MKRTADGSEFESPKKKRKVSEVEFSHEYWMRHALTLAKRARDEREVPVGAVLVLNNRVIGEGWNRAIGLHDPTAHAEIMALRQGGLVMQNYRLYDATLYSTFEPCVMCAGAMIHSRIGRVVFGVRNAKTGAAGSLMDVLHHPGMNHRVEITEGILADECAALLCRFFRMPRRVFNAQKKAQSSTDSGGSSGGSSGSETPGTSESATPESSGGSSGGSDKKYSIGLAIGTNSVGWAVITDEYKVPSKKFKVLGNTDRHSIKKNLIGALLFDSGETAEATRLKRTARRRYTRRKNRICYLQEIFSNEMAKVDDSFFHRLEESFLVEEDKKHERHPIFGNIVDEVAYHEKYPTIYHLRKKLVDSTDKADLRLIYLALAHMIKFRGHFLIEGDLNPDNSDVDKLFIQLVQTYNQLFEENPINASGVDAKAILSARLSKSRRLENLIAQLPGEKKNGLFGNLIALSLGLTPNFKSNFDLAEDAKLQLSKDTYDDDLDNLLAQIGDQYADLFLAAKNLSDAILLSDILRVNTEITKAPLSASMIKRYDEHHQDLTLLKALVRQQLPEKYKEIFFDQSKNGYAGYIDGGASQEEFYKFIKPILEKMDGTEELLVKLNREDLLRKQRTFDNGSIPHQIHLGELHAILRRQEDFYPFLKDNREKIEKILTFRIPYYVGPLARGNSRFAWMTRKSEETITPWNFEEVVDKGASAQSFIERMTNFDKNLPNEKVLPKHSLLYEYFTVYNELTKVKYVTEGMRKPAFLSGEQKKAIVDLLFKTNRKVTVKQLKEDYFKKIECFDSVEISGVEDRFNASLGTYHDLLKIIKDKDFLDNEENEDILEDIVLTLTLFEDREMIEERLKTYAHLFDDKVMKQLKRRRYTGWGRLSRKLINGIRDKQSGKTILDFLKSDGFANRNFMQLIHDDSLTFKEDIQKAQVSGQGDSLHEHIANLAGSPAIKKGILQTVKVVDELVKVMGRHKPENIVIEMARENQTTQKGQKNSRERMKRIEEGIKELGSQILKEHPVENTQLQNEKLYLYYLQNGRDMYVDQELDINRLSDYDVDHIVPQSFLKDDSIDNKVLTRSDKNRGKSDNVPSEEVVKKMKNYWRQLLNAKLITQRKFDNLTKAERGGLSELDKAGFIKRQLVETRQITKHVAQILDSRMNTKYDENDKLIREVKVITLKSKLVSDFRKDFQFYKVREINNYHHAHDAYLNAVVGTALIKKYPKLESEFVYGDYKVYDVRKMIAKSEQEIGKATAKYFFYSNIMNFFKTEITLANGEIRKRPLIETNGETGEIVWDKGRDFATVRKVLSMPQVNIVKKTEVQTGGFSKESIRPKRNSDKLIARKKDWDPKKYGGFVSPTVAYSVLVVAKVEKGKSKKLKSVKELLGITIMERSSFEKNPIDFLEAKGYKEVKKDLIIKLPKYSLFELENGRKRMLASARFLQKGNELALPSKYVNFLYLASHYEKLKGSPEDNEQKQLFVEQHKHYLDEIIEQISEFSKRVILADANLDKVLSAYNKHRDKPIREQAENIIHLFTLTNLGAPRAFKYFDTTIDRKVYRSTKEVLDATLIHQSITGLYETRIDLSQLGGDEGADKRTADGSEFESPKKKRKV

SEQ ID NO: 446 - protein, 1606 aa, synthetic construct
MKRTADGSEFESPKKKRKVSEVEFSHEYWMRHALTLAKRARDEREVPVGAVLVLNNRVIGEGWNRAIGLHDPTAHAEIMALRQGGLVMQNYRLYDATLYSTFEPCVMCAGAMIHSRIGRVVFGVRNAKTGAAGSLMDVLHHPGMNHRVEITEGILADECAALLCRFFRMPRRVFNAQKKAQSSTDSGGSSGGSSGSETPGTSESATPESSGGSSGGSDKKYSIGLAIGTNSVGWAVITDEYKVPSKKFKVLGNTDRHSIKKNLIGALLFDSGETAEATRLKRTARRRYTRRKNRICYLQEIFSNEMAKVDDSFFHRLEESFLVEEDKKHERHPIFGNIVDEVAYHEKYPTIYHLRKKLVDSTDKADLRLIYLALAHMIKFRGHFLIEGDLNPDNSDVDKLFIQLVQTYNQLFEENPINASGVDAKAILSARLSKSRRLENLIAQLPGEKKNGLFGNLIALSLGLTPNFKSNFDLAEDAKLQLSKDTYDDDLDNLLAQIGDQYADLFLAAKNLSDAILLSDILRVNTEITKAPLSASMVKRYDEHHQDLTLLKALVRQQLPEKYKEIFFDQSKNGYAGYIDGGASQEEFYKFIKPILEKMDGTEELLVKLNREDLLRKQRTFDNGIIPHQIHLGELHAILRRQGDFYPFLKDNREKIEKILTFRIPYYVGPLARGNSRFAWMTRKSEETITPWNFEEVVDKGASAQSFIERMTNFDKNLPNEKVLPKHSLLYEYFTVYNELTKVKYVTEGMRKPAFLSGEQKKAIVDLLFKTNRKVTVKQLKEDYFKKIECFDSVEISGVEDRFNASLGTYHDLLKIIKDKDFLDNEENEDILEDIVLTLTLFEDREMIEERLKTYAHLFDDKVMKQLKRLRYTGWGRLSRKLINGIRDKQSGKTILDFLKSDGFANRNFMQLIHDDSLTFKEDIQKAQVSGQGDSLHEHIANLAGSPAIKKGILQTVKVVDELVKVMGGHKPENIVIEMARENQTTQKGQKNSRERMKRIEEGIKELGSQILKEHPVENTQLQNEKLYLYYLQNGRDMYVDQELDINRLSDYDVDHIVPQSFLKDDSIDNKVLTRSDKNRGKSDNVPSEEVVKKMKNYWRQLLNAKLITQRKFDNLTKAERGGLSELDKAGFIKRQLVETRQITKHVAQILDSRMNTKYDENDKLIREVKVITLKSKLVSDFRKDFQFYKVREINNYHHAHDAYLNAVVGTALIKKYPKLESEFVYGDYKVYDVRKMIAKSEQEIGKATAKYFFYSNIMNFFKTEITLANGEIRKRPLIETNGETGEIVWDKGRDFATVRKVLSMPQVNIVKKTEVQTGGFSKESILPKGNSDKLIARKKDWDPKKYGGFNSPTVAYSVLVVAKVEKGKSKKLKSVKELLGITIMERSSFEKNPIGFLEAKGYKEVKKDLIIKLPKYSLFELENGRKRMLASASVLHKGNELALPSKYVNFLYLASHYEKLKGSSEDNKQKQLFVEQHKHYLDEIIEQISEFSKRVILADANLDKVLSAYNKHRDKPIREQAENIIHLFTLTNLGASAAFKYFDTTIGRKLYTSTKEVLDATLIHQSITGLYETRIDLSQLGGDEGADKRTADGSEFESPKKKRKV

SEQ ID NO: 447 - protein, 1606 aa, synthetic construct
MKRTADGSEFESPKKKRKVSEVEFSHEYWMRHALTLAKRARDEREVPVGAVLVLNNRVIGEGWNRAIGLHDPTAHAEIMALRQGGLVMQNYRLYDATLYSTFEPCVMCAGAMIHSRIGRVVFGVRNAKTGAAGSLMDVLHHPGMNHRVEITEGILADECAALLCRFFRMPRRVFNAQKKAQSSTDSGGSSGGSSGSETPGTSESATPESSGGSSGGSDKKYSIGLAIGTNSVGWAVITDEYKVPSKKFKVLGNTDRHSIKKNLIGALLFDSGETAEATRLKRTARRRYTRRKNRICYLQEIFSNEMAKVDDSFFHRLEESFLVEEDKKHERHPIFGNIVDEVAYHEKYPTIYHLRKKLVDSTDKADLRLIYLALAHMIKFRGHFLIEGDLNPDNSDVDKLFIQLVQTYNQLFEENPINASGVDAKAILSARLSKSRRLENLIAQLPGEKKNGLFGNLIALSLGLTPNFKSNFDLAEDAKLQLSKDTYDDDLDNLLAQIGDQYADLFLAAKNLSDAILLSDILRVNTEITKAPLSASMVKRYDEHHQDLTLLKALVRQQLPEKYKEIFFDQSKNGYAGYIDGGASQEEFYKFIKPILEKMDGTEELLVKLNREDLLRKQRTFDNGIIPHQIHLGELHAILRRQGDFYPFLKDNREKIEKILTFRIPYYVGPLARGNSRFAWMTRKSEETITPWNFEEVVDKGASAQSFIERMTNFDKNLPNEKVLPKHSLLYEYFTVYNELTKVKYVTEGMRKPAFLSGEQKKAIVDLLFKTNRKVTVKQLKEDYFKKIECFDSVEISGVEDRFNASLGTYHDLLKIIKDKDFLDNEENEDILEDIVLTLTLFEDREMIEERLKTYAHLFDDKVMKQLKRLRYTGWGRLSRKLINGIRDKQSGKTILDFLKSDGFANRNFMQLIHDDSLTFKEDIQKAQVSGQGDSLHEHIANLAGSPAIKKGILQTVKVVDELVKVMGGHKPENIVIEMARENQTTQKGQKNSRERMKRIEEGIKELGSQILKEHPVENTQLQNEKLYLYYLQNGRDMYVDQELDINRLSDYDVDHIVPQSFLKDDSIDNKVLTRSDKNRGKSDNVPSEEVVKKMKNYWRQLLNAKLITQRKFDNLTKAERGGLSELDKAGFIKRQLVETRQITKHVAQILDSRMNTKYDENDKLIREVKVITLKSKLVSDFRKDFQFYKVREINNYHHAHDAYLNAVVGTALIKKYPKLESEFVYGDYKVYDVRKMIAKSEQEIGKATAKYFFYSNIMNFFKTEITLANGEIRKRPLIETNGETGEIVWDKGRDFATVRKVLSMPQVNIVKKTEVQTGGFSKESILPKGNSDKLIARKKDWDPKKYGGFMQPTVAYSVLVVAKVEKGKSKKLKSVKELLGITIMERSSFEKNPIDFLEAKGYKEVKKDLIIKLPKYSLFELENGRKRMLASAKFLQKGNELALPSKYVNFLYLASHYEKLKGSPEDNEQKQLFVEQHKHYLDEIIEQISEFSKRVILADANLDKVLSAYNKHRDKPIREQAENIIHLFTLTNLGAPRAFKYFDTTIARKEYRSTKEVLDATLIHQSITGLYETRIDLSQLGGDEGADKRTADGSEFESPKKKRKV

SEQ ID NO: 448 - protein, 1594 aa, synthetic construct
MKRTADGSEFESPKKKRKVDKKYSIGLAIGTNSVGWAVITDEYKVPSKKFKVLGNTDRHSIKKNLIGALLFDSGETAEATRLKRTARRRYTRRKNRICYLQEIFSNEMAKVDDSFFHRLEESFLVEEDKKHERHPIFGNIVDEVAYHEKYPTIYHLRKKLVDSTDKADLRLIYLALAHMIKFRGHFLIEGDLNPDNSDVDKLFIQLVQTYNQLFEENPINASGVDAKAILSARLSKSRRLENLIAQLPGEKKNGLFGNLIALSLGLTPNFKSNFDLAEDAKLQLSKDTYDDDLDNLLAQIGDQYADLFLAAKNLSDAILLSDILRVNTEITKAPLSASMVKRYDEHHQDLTLLKALVRQQLPEKYKEIFFDQSKNGYAGYIDGGASQEEFYKFIKPILEKMDGTEELLVKLNREDLLRKQRTFDNGIIPHQIHLGELHAILRRQGDFYPFLKDNREKIEKILTFRIPYYVGPLARGNSRFAWMTRKSEETITPWNFEEVVDKGASAQSFIERMTNFDKNLPNEKVLPKHSLLYEYFTVYNELTKVKYVTEGMRKPAFLSGEQKKAIVDLLFKTNRKVTVKQLKEDYFKKIECFDSVEISGVEDRFNASLGTYHDLLKIIKDKDFLDNEENEDILEDIVLTLTLFEDREMIEERLKTYAHLFDDKVMKQLKRLRYTGWGRLSRKLINGIRDKQSGKTILDFLKSDGFANRNFMQLIHDDSLTFKEDIQKAQVSGQGDSLHEHIANLAGSPAIKKGILQTVKVVDELVKVMGGHKPENIVIEMARENQTTQKGQKNSRERMKRIEEGIKELGSQILKEHPVENTQLQNEKLYLYYLQNGRDMYVDQELDINRLSDYDVDHIVPQSFLKDDSIDNKVLTRSDKNRGKSDNVPSEEVVKKMKNYWRQLLNAKLITQRKFDNLTKAERGGLSELDKAGFIKRQLVETRQITKHVAQILDSRMNTKYDENDKLIREVKVITLKSKLVSDFRKDFQFYKVREINNYHHAHDAYLNAVVGTALIKKYPKLESEFVYGDYKVYDVRKMIAKSEQEIGKATAKYFFYSNIMNFFKTEITLANGEIRKRPLIETNGETGEIVWDKGRDFATVRKVLSMPQVNIVKKTEVQTGGFSKESILPKGNSDKLIARKKDWDPKKYGGFMQPTVAYSVLVVAKVEKGKSKKLKSVKELLGITIMERSSFEKNPIDFLEAKGYKEVKKDLIIKLPKYSLFELENGRKRMLASAKFLQKGNELALPSKYVNFLYLASHYEKLKGGSSGSETPGTSESATPESSGSEVEFSHEYWMRHALTLAKRARDEREVPVGAVLVLNNRVIGEGWNRAIGLHDPTAHAEIMALRQGGLVMQNYRLYDATLYSTFEPCVMCAGAMIHSRIGRVVFGVRNAKTGAAGSLMDVLHHPGMNHRVEITEGILADECAALLCRFFRMPRRVFNAQKKAQSSTDSPEDNEQKQLFVEQHKHYLDEIIEQISEFSKRVILADANLDKVLSAYNKHRDKPIREQAENIIHLFTLTNLGAPRAFKYFDTTIARKEYRSTKEVLDATLIHQSITGLYETRIDLSQLGGDEGADKRTADGSEFESPKKKRKV

SEQ ID NO: 449 - protein, 1306 aa, synthetic construct
MSEVEFSHEYWMRHALTLAKRARDEREVPVGAVLVLNNRVIGEGWNRAIGLHDPTAHAEIMALRQGGLVMQNYRLYDATLYSTFEPCVMCAGAMIHSRIGRVVFGVRNAKTGAAGSLMDVLHHPGMNHRVEITEGILADECAALLCRFFRMPRRVFNAQKKAQSSTDSGGSSGGSSGSETPGTSESATPESSGGSSGGSKRNYILGLAIGITSVGYGIIDYETRDVIDAGVRLFKEANVENNEGRRSKRGARRLKRRRRHRIQRVKKLLFDYNLLTDHSELSGINPYEARVKGLSQKLSEEEFSAALLHLAKRRGVHNVNEVEEDTGNELSTKEQISRNSKALEEKYVAELQLERLKKDGEVRGSINRFKTSDYVKEAKQLLKVQKAYHQLDQSFIDTYIDLLETRRTYYEGPGEGSPFGWKDIKEWYEMLMGHCTYFPEELRSVKYAYNADLYNALNDLNNLVITRDENEKLEYYEKFQIIENVFKQKKKPTLKQIAKEILVNEEDIKGYRVTSTGKPEFTNLKVYHDIKDITARKEIIENAELLDQIAKILTIYQSSEDIQEELTNLNSELTQEEIEQISNLKGYTGTHNLSLKAINLILDELWHTNDNQIAIFNRLKLVPKKVDLSQQKEIPTTLVDDFILSPVVKRSFIQSIKVINAIIKKYGLPNDIIIELAREKNSKDAQKMINEMQKRNRQTNERIEEIIRTTGKENAKYLIEKIKLHDMQEGKCLYSLEAIPLEDLLNNPFNYEVDHIIPRSVSFDNSFNNKVLVKQEENSKKGNRTPFQYLSSSDSKISYETFKKHILNLAKGKGRISKTKKEYLLEERDINRFSVQKDFINRNLVDTRYATRGLMNLLRSYFRVNNLDVKVKSINGGFTSFLRRKWKFKKERNKGYKHHAEDALIIANADFIFKEWKKLDKAKKVMENQMFEEKQAESMPEIETEQEYKEIFITPHQIKHIKDFKDYKYSHRVDKKPNRKLINDTLYSTRKDDKGNTLIVNNLNGLYDKDNDKLKKLINKSPEKLLMYHHDPQTYQKLKLIMEQYGDEKNPLYKYYEETGNYLTKYSKKDNGPVIKKIKYYGNKLNAHLDITDDYPNSRNKVVKLSLKPYRFDVYLDNGVYKFVTVKNLDVIKKENYYEVNSKCYEEAKKLKKISNQAEFIASFYKNDLIKINGELYRVIGVNNDLLNRIEVNMIDITYREYLENMNDKRPPHIIKTIASKTQSIKKYSTDILGNLYEVKSKKHPQIIKKGGSPKKKRKVSSDYKDHDGDYKDHDIDYKDDDDKEGADKRTADGSEFESPKKKRKV

SEQ ID NO: 450 - protein, 1588 aa, synthetic construct
MSEVEFSHEYWMRHALTLAKRARDEREVPVGAVLVLNNRVIGEGWNRAIGLHDPTAHAEIMALRQGGLVMQNYRLYDATLYTTFEPCVMCAGAMIHSRIGRVVFGVRNAKTGAAGSLMDVLHHPGMNHRVEITEGILADECAALLCRFFRMPRRVFNAQKKAQSSTDSGGSSGGSSGSETPGTSESATPESSGGSSGGSDKKYSIGLAIGTNSVGWAVITDEYKVPSKKFKVLGNTDRHSIKKNLIGALLFDSGETAERTRLKRTARRRYTRRKNRICYLQEIFSNEMAKVDDSFFHRLEESFLVEEDKKHERHPIFGNIVDEVAYHEKYPTIYHLRKKLVDSTDKADLRLIYLALAHMIKFRGHFLIEGDLNPDNSDVDKLFIQLVQTYNQLFEENPINASGVDAKAILSARLSKSRRLENLIAQLPGEKKNGLFGNLIALSLGLTPNFKSNFDLAEDAKLQLSKDTYDDDLDNLLAQIGDQYADLFLAAKNLSDAILLSDILRVNTEITKAPLSASMIKRYDEHHQDLTLLKALVRQQLPEKYKEIFFDQSKNGYAGYIDGGASQEEFYKFIKPILEKMDGTEELLVKLNREDLLRKQRTFDNGSIPHQIHLGELHAILRRQEDFYPFLKDNREKIEKILTFRIPYYVGPLARGNSRFAWMTRKSEETITPWNFEEVVDKGASAQSFIERMTNFDKNLPNEKVLPKHSLLYEYFTVYNELTKVKYVTEGMRKPAFLSGEQKKAIVDLLFKTNRKVTVKQLKEDYFKKIECFDSVEISGVEDRFNASLGTYHDLLKIIKDKDFLDNEENEDILEDIVLTLTLFEDREMIEERLKTYAHLFDDKVMKQLKRRRYTGWGRLSRKLINGIRDKQSGKTILDFLKSDGFANRNFMQLIHDDSLTFKEDIQKAQVSGQGDSLHEHIANLAGSPAIKKGILQTVKVVDELVKVMGRHKPENIVIEMARENQTTQKGQKNSRERMKRIEEGIKELGSQILKEHPVENTQLQNEKLYLYYLQNGRDMYVDQELDINRLSDYDVDHIVPQSFLKDDSIDNKVLTRSDKNRGKSDNVPSEEVVKKMKNYWRQLLNAKLITQRKFDNLTKAERGGLSELDKAGFIKRQLVETRQITKHVAQILDSRMNTKYDENDKLIREVKVITLKSKLVSDFRKDFQFYKVREINNYHHAHDAYLNAVVGTALIKKYPKLESEFVYGDYKVYDVRKMIAKSEQEIGKATAKYFFYSNIMNFFKTEITLANGEIRKRPLIETNGETGEIVWDKGRDFATVRKVLSMPQVNIVKKTEVQTGGFSKESIRPKRNSDKLIARKKDWDPKKYGGFLWPTVAYSVLVVAKVEKGKSKKLKSVKELLGITIMERSSFEKNPIDFLEAKGYKEVKKDLIIKLPKYSLFELENGRKRMLASAKQLQKGNELALPSKYVNFLYLASHYEKLKGSPEDNEQKQLFVEQHKHYLDEIIEQISEFSKRVILADANLDKVLSAYNKHRDKPIREQAENIIHLFTLTRLGAPRAFKYFDTTIDPKQYRSTKEVLDATLIHQSITGLYETRIDLSQLGGDEGADKRTADGSEFESPKKKRKV

SEQ ID NO: 451 - protein, 1594 aa, synthetic construct
MKRTADGSEFESPKKKRKVDKKYSIGLAIGTNSVGWAVITDEYKVPSKKFKVLGNTDRHSIKKNLIGALLFDSGETAEATRLKRTARRRYTRRKNRICYLQEIFSNEMAKVDDSFFHRLEESFLVEEDKKHERHPIFGNIVDEVAYHEKYPTIYHLRKKLVDSTDKADLRLIYLALAHMIKFRGHFLIEGDLNPDNSDVDKLFIQLVQTYNQLFEENPINASGVDAKAILSARLSKSRRLENLIAQLPGEKKNGLFGNLIALSLGLTPNFKSNFDLAEDAKLQLSKDTYDDDLDNLLAQIGDQYADLFLAAKNLSDAILLSDILRVNTEITKAPLSASMIKRYDEHHQDLTLLKALVRQQLPEKYKEIFFDQSKNGYAGYIDGGASQEEFYKFIKPILEKMDGTEELLVKLNREDLLRKQRTFDNGSIPHQIHLGELHAILRRQEDFYPFLKDNREKIEKILTFRIPYYVGPLARGNSRFAWMTRKSEETITPWNFEEVVDKGASAQSFIERMTNFDKNLPNEKVLPKHSLLYEYFTVYNELTKVKYVTEGMRKPAFLSGEQKKAIVDLLFKTNRKVTVKQLKEDYFKKIECFDSVEISGVEDRFNASLGTYHDLLKIIKDKDFLDNEENEDILEDIVLTLTLFEDREMIEERLKTYAHLFDDKVMKQLKRRRYTGWGRLSRKLINGIRDKQSGKTILDFLKSDGFANRNFMQLIHDDSLTFKEDIQKAQVSGQGDSLHEHIANLAGSPAIKKGILQTVKVVDELVKVMGRHKPENIVIEMARENQTTQKGQKNSRERMKRIEEGIKELGSQILKEHPVENTQLQNEKLYLYYLQNGRDMYVDQELDINRLSDYDVDHIVPQSFLKDDSIDNKVLTRSDKNRGKSDNVPSEEVVKKMKNYWRQLLNAKLITQRKFDNLTKAERGGLSELDKAGFIKRQLVETRQITKHVAQILDSRMNTKYDENDKLIREVKVITLKSKLVSDFRKDFQFYKVREINNYHHAHDAYLNAVVGTALIKKYPKLESEFVYGDYKVYDVRKMIAKSEQEIGKATAKYFFYSNIMNFFKTEITLANGEIRKRPLIETNGETGEIVWDKGRDFATVRKVLSMPQVNIVKKTEVQTGGFSKESILPKRNSDKLIARKKDWDPKKYGGFDSPTVAYSVLVVAKVEKGKSKKLKSVKELLGITIMERSSFEKNPIDFLEAKGYKEVKKDLIIKLPKYSLFELENGRKRMLASAGELQKGNELALPSKYVNFLYLASHYEKLKGGSSGSETPGTSESATPESSGSEVEFSHEYWMRHALTLAKRARDEREVPVGAVLVLNNRVIGEGWNRAIGLHDPTAHAEIMALRQGGLVMQNYRLYDATLYSTFEPCVMCAGAMIHSRIGRVVFGVRNAKTGAAGSLMDVLHHPGMNHRVEITEGILADECAALLCRFFRMPRRVFNAQKKAQSSTDSPEDNEQKQLFVEQHKHYLDEIIEQISEFSKRVILADANLDKVLSAYNKHRDKPIREQAENIIHLFTLTNLGAPAAFKYFDTTIDRKRYTSTKEVLDATLIHQSITGLYETRIDLSQLGGDEGADKRTADGSEFESPKKKRKV

SEQ ID NO: 452 - protein, 1594 aa, synthetic construct
MKRTADGSEFESPKKKRKVDKKYSIGLAIGTNSVGWAVITDEYKVPSKKFKVLGNTDRHSIKKNLIGALLFDSGETAEATRLKRTARRRYTRRKNRICYLQEIFSNEMAKVDDSFFHRLEESFLVEEDKKHERHPIFGNIVDEVAYHEKYPTIYHLRKKLVDSTDKADLRLIYLALAHMIKFRGHFLIEGDLNPDNSDVDKLFIQLVQTYNQLFEENPINASGVDAKAILSARLSKSRRLENLIAQLPGEKKNGLFGNLIALSLGLTPNFKSNFDLAEDAKLQLSKDTYDDDLDNLLAQIGDQYADLFLAAKNLSDAILLSDILRVNTEITKAPLSASMVKRYDEHHQDLTLLKALVRQQLPEKYKEIFFDQSKNGYAGYIDGGASQEEFYKFIKPILEKMDGTEELLVKLNREDLLRKQRTFDNGIIPHQIHLGELHAILRRQGDFYPFLKDNREKIEKILTFRIPYYVGPLARGNSRFAWMTRKSEETITPWNFEEVVDKGASAQSFIERMTNFDKNLPNEKVLPKHSLLYEYFTVYNELTKVKYVTEGMRKPAFLSGEQKKAIVDLLFKTNRKVTVKQLKEDYFKKIECFDSVEISGVEDRFNASLGTYHDLLKIIKDKDFLDNEENEDILEDIVLTLTLFEDREMIEERLKTYAHLFDDKVMKQLKRLRYTGWGRLSRKLINGIRDKQSGKTILDFLKSDGFANRNFMQLIHDDSLTFKEDIQKAQVSGQGDSLHEHIANLAGSPAIKKGILQTVKVVDELVKVMGGHKPENIVIEMARENQTTQKGQKNSRERMKRIEEGIKELGSQILKEHPVENTQLQNEKLYLYYLQNGRDMYVDQELDINRLSDYDVDHIVPQSFLKDDSIDNKVLTRSDKNRGKSDNVPSEEVVKKMKNYWRQLLNAKLITQRKFDNLTKAERGGLSELDKAGFIKRQLVETRQITKHVAQILDSRMNTKYDENDKLIREVKVITLKSKLVSDFRKDFQFYKVREINNYHHAHDAYLNAVVGTALIKKYPKLESEFVYGDYKVYDVRKMIAKSEQEIGSSGSETPGTSESATPESSGSEVEFSHEYWMRHALTLAKRARDEREVPVGAVLVLNNRVIGEGWNRAIGLHDPTAHAEIMALRQGGLVMQNYRLYDATLYSTFEPCVMCAGAMIHSRIGRVVFGVRNAKTGAAGSLMDVLHHPGMNHRVEITEGILADECAALLCRFFRMPRRVFNAQKKAQSSTDGKATAKYFFYSNIMNFFKTEITLANGEIRKRPLIETNGETGEIVWDKGRDFATVRKVLSMPQVNIVKKTEVQTGGFSKESILPKGNSDKLIARKKDWDPKKYGGFMQPTVAYSVLVVAKVEKGKSKKLKSVKELLGITIMERSSFEKNPIDFLEAKGYKEVKKDLIIKLPKYSLFELENGRKRMLASAKFLQKGNELALPSKYVNFLYLASHYEKLKGSPEDNEQKQLFVEQHKHYLDEIIEQISEFSKRVILADANLDKVLSAYNKHRDKPIREQAENIIHLFTLTNLGAPRAFKYFDTTIARKEYRSTKEVLDATLIHQSITGLYETRIDLSQLGGDEGADKRTADGSEFESPKKKRKV

SEQ ID NO: 453 - protein, 1588 aa, synthetic construct
MSEVEFSHEYWMRHALTLAKRARDEREVPVGAVLVLNNRVIGEGWNRAIGLHDPTAHAEIMALRQGGLVMQNYRLYDATLYTTFEPCVMCAGAMIHSRIGRVVFGVRNAKTGAAGSLMDVLHHPGMNHRVEITEGILADECAALLCRFFRMPRRVFNAQKKAQSSTDSGGSSGGSSGSETPGTSESATPESSGGSSGGSDKKYSIGLAIGTNSVGWAVITDEYKVPSKKFKVLGNTDRHSIKKNLIGALLFDSGETAEATRLKRTARRRYTRRKNRICYLQEIFSNEMAKVDDSFFHRLEESFLVEEDKKHERHPIFGNIVDEVAYHEKYPTIYHLRKKLVDSTDKADLRLIYLALAHMIKFRGHFLIEGDLNPDNSDVDKLFIQLVQTYNQLFEENPINASGVDAKAILSARLSKSRRLENLIAQLPGEKKNGLFGNLIALSLGLTPNFKSNFDLAEDAKLQLSKDTYDDDLDNLLAQIGDQYADLFLAAKNLSDAILLSDILRVNTEITKAPLSASMVKRYDEHHQDLTLLKALVRQQLPEKYKEIFFDQSKNGYAGYIDGGASQEEFYKFIKPILEKMDGTEELLVKLNREDLLRKQRTFDNGIIPHQIHLGELHAILRRQGDFYPFLKDNREKIEKILTFRIPYYVGPLARGNSRFAWMTRKSEETITPWNFEEVVDKGASAQSFIERMTNFDKNLPNEKVLPKHSLLYEYFTVYNELTKVKYVTEGMRKPAFLSGEQKKAIVDLLFKTNRKVTVKQLKEDYFKKIECFDSVEISGVEDRFNASLGTYHDLLKIIKDKDFLDNEENEDILEDIVLTLTLFEDREMIEERLKTYAHLFDDKVMKQLKRLRYTGWGRLSRKLINGIRDKQSGKTILDFLKSDGFANRNFMQLIHDDSLTFKEDIQKAQVSGQGDSLHEHIANLAGSPAIKKGILQTVKVVDELVKVMGGHKPENIVIEMARENQTTQKGQKNSRERMKRIEEGIKELGSQILKEHPVENTQLQNEKLYLYYLQNGRDMYVDQELDINRLSDYDVDHIVPQSFLKDDSIDNKVLTRSDKNRGKSDNVPSEEVVKKMKNYWRQLLNAKLITQRKFDNLTKAERGGLSELDKAGFIKRQLVETRQITKHVAQILDSRMNTKYDENDKLIREVKVITLKSKLVSDFRKDFQFYKVREINNYHHAHDAYLNAVVGTALIKKYPKLESEFVYGDYKVYDVRKMIAKSEQEIGKATAKYFFYSNIMNFFKTEITLANGEIRKRPLIETNGETGEIVWDKGRDFATVRKVLSMPQVNIVKKTEVQTGGFSKESILPKGNSDKLIARKKDWDPKKYGGFNSPTVAYSVLVVAKVEKGKSKKLKSVKELLGITIMERSSFEKNPIDFLEAKGYKEVKKDLIIKLPKYSLFELENGRKRMLASAGVLQKGNELALPSKYVNFLYLASHYEKLKGSPEDNEQKQLFVEQHKHYLDEIIEQISEFSKRVILADANLDKVLSAYNKHRDKPIREQAENIIHLFTLTNLGAPAAFKYFDTTINRKQYNTTKEVLDATLIRQSITGLYETRIDLSQLGGDEGADKRTADGSEFESPKKKRKV

SEQ ID NO: 454 - protein, 1606 aa, synthetic construct
MKRTADGSEFESPKKKRKVSEVEFSHEYWMRHALTLAKRARDEREVPVGAVLVLNNRVIGEGWNRAIGLHDPTAHAEIMALRQGGLVMQNYRLYDATLYTTFEPCVMCAGAMIHSRIGRVVFGVRNAKTGAAGSLMDVLHHPGMNHRVEITEGILADECAALLCRFYRMPRRVFNAQKKAQSSTDSGGSSGGSSGSETPGTSESATPESSGGSSGGSDKKYSIGLAIGTNSVGWAVITDEYKVPSKKFKVLGNTDRHSIKKNLIGALLFDSGETAEATRLKRTARRRYTRRKNRICYLQEIFSNEMAKVDDSFFHRLEESFLVEEDKKHERHPIFGNIVDEVAYHEKYPTIYHLRKKLVDSTDKADLRLIYLALAHMIKFRGHFLIEGDLNPDNSDVDKLFIQLVQTYNQLFEENPINASGVDAKAILSARLSKSRRLENLIAQLPGEKKNGLFGNLIALSLGLTPNFKSNFDLAEDAKLQLSKDTYDDDLDNLLAQIGDQYADLFLAAKNLSDAILLSDILRVNTEITKAPLSASMVKRYDEHHQDLTLLKALVRQQLPEKYKEIFFDQSKNGYAGYIDGGASQEEFYKFIKPILEKMDGTEELLVKLNREDLLRKQRTFDNGIIPHQIHLGELHAILRRQGDFYPFLKDNREKIEKILTFRIPYYVGPLARGNSRFAWMTRKSEETITPWNFEEVVDKGASAQSFIERMTNFDKNLPNEKVLPKHSLLYEYFTVYNELTKVKYVTEGMRKPAFLSGEQKKAIVDLLFKTNRKVTVKQLKEDYFKKIECFDSVEISGVEDRFNASLGTYHDLLKIIKDKDFLDNEENEDILEDIVLTLTLFEDREMIEERLKTYAHLFDDKVMKQLKRLRYTGWGRLSRKLINGIRDKQSGKTILDFLKSDGFANRNFMQLIHDDSLTFKEDIQKAQVSGQGDSLHEHIANLAGSPAIKKGILQTVKVVDELVKVMGGHKPENIVIEMARENQTTQKGQKNSRERMKRIEEGIKELGSQILKEHPVENTQLQNEKLYLYYLQNGRDMYVDQELDINRLSDYDVDHIVPQSFLKDDSIDNKVLTRSDKNRGKSDNVPSEEVVKKMKNYWRQLLNAKLITQRKFDNLTKAERGGLSELDKAGFIKRQLVETRQITKHVAQILDSRMNTKYDENDKLIREVKVITLKSKLVSDFRKDFQFYKVREINNYHHAHDAYLNAVVGTALIKKYPKLESEFVYGDYKVYDVRKMIAKSEQEIGKATAKYFFYSNIMNFFKTEITLANGEIRKRPLIETNGETGEIVWDKGRDFATVRKVLSMPQVNIVKKTEVQTGGFSKESILPKGNSDKLIARKKDWDPKKYGGFMQPTVAYSVLVVAKVEKGKSKKLKSVKELLGITIMERSSFEKNPIDFLEAKGYKEVKKDLIIKLPKYSLFELENGRKRMLASAKFLQKGNELALPSKYVNFLYLASHYEKLKGSPEDNEQKQLFVEQHKHYLDEIIEQISEFSKRVILADANLDKVLSAYNKHRDKPIREQAENIIHLFTLTNLGAPRAFKYFDTTIARKEYRSTKEVLDATLIHQSITGLYETRIDLSQLGGDEGADKRTADGSEFESPKKKRKV

SEQ ID NO: 455 - protein, 1606 aa, synthetic construct
MKRTADGSEFESPKKKRKVSEVEFSHEYWMRHALTLAKRARDEREVPVGAVLVLNNRVIGEGWNRAIGLHDPTAHAEIMALRQGGLVMQNYRLYDATLYTTFEPCVMCAGAMIHSRIGRVVFGVRNAKTGAAGSLMDVLHHPGMNHRVEITEGILADECAALLCDFYRMPRRVFNAQKKAQSSINSGGSSGGSSGSETPGTSESATPESSGGSSGGSDKKYSIGLAIGTNSVGWAVITDEYKVPSKKFKVLGNTDRHSIKKNLIGALLFDSGETAEATRLKRTARRRYTRRKNRICYLQEIFSNEMAKVDDSFFHRLEESFLVEEDKKHERHPIFGNIVDEVAYHEKYPTIYHLRKKLVDSTDKADLRLIYLALAHMIKFRGHFLIEGDLNPDNSDVDKLFIQLVQTYNQLFEENPINASGVDAKAILSARLSKSRRLENLIAQLPGEKKNGLFGNLIALSLGLTPNFKSNFDLAEDAKLQLSKDTYDDDLDNLLAQIGDQYADLFLAAKNLSDAILLSDILRVNTEITKAPLSASMVKRYDEHHQDLTLLKALVRQQLPEKYKEIFFDQSKNGYAGYIDGGASQEEFYKFIKPILEKMDGTEELLVKLNREDLLRKQRTFDNGIIPHQIHLGELHAILRRQGDFYPFLKDNREKIEKILTFRIPYYVGPLARGNSRFAWMTRKSEETITPWNFEEVVDKGASAQSFIERMTNFDKNLPNEKVLPKHSLLYEYFTVYNELTKVKYVTEGMRKPAFLSGEQKKAIVDLLFKTNRKVTVKQLKEDYFKKIECFDSVEISGVEDRFNASLGTYHDLLKIIKDKDFLDNEENEDILEDIVLTLTLFEDREMIEERLKTYAHLFDDKVMKQLKRLRYTGWGRLSRKLINGIRDKQSGKTILDFLKSDGFANRNFMQLIHDDSLTFKEDIQKAQVSGQGDSLHEHIANLAGSPAIKKGILQTVKVVDELVKVMGGHKPENIVIEMARENQTTQKGQKNSRERMKRIEEGIKELGSQILKEHPVENTQLQNEKLYLYYLQNGRDMYVDQELDINRLSDYDVDHIVPQSFLKDDSIDNKVLTRSDKNRGKSDNVPSEEVVKKMKNYWRQLLNAKLITQRKFDNLTKAERGGLSELDKAGFIKRQLVETRQITKHVAQILDSRMNTKYDENDKLIREVKVITLKSKLVSDFRKDFQFYKVREINNYHHAHDAYLNAVVGTALIKKYPKLESEFVYGDYKVYDVRKMIAKSEQEIGKATAKYFFYSNIMNFFKTEITLANGEIRKRPLIETNGETGEIVWDKGRDFATVRKVLSMPQVNIVKKTEVQTGGFSKESILPKGNSDKLIARKKDWDPKKYGGFMQPTVAYSVLVVAKVEKGKSKKLKSVKELLGITIMERSSFEKNPIDFLEAKGYKEVKKDLIIKLPKYSLFELENGRKRMLASAKFLQKGNELALPSKYVNFLYLASHYEKLKGSPEDNEQKQLFVEQHKHYLDEIIEQISEFSKRVILADANLDKVLSAYNKHRDKPIREQAENIIHLFTLTNLGAPRAFKYFDTTIARKEYRSTKEVLDATLIHQSITGLYETRIDLSQLGGDEGADKRTADGSEFESPKKKRKV

SEQ ID NO: 456 - protein, 1606 aa, synthetic construct
MKRTADGSEFESPKKKRKVSEVEFSHEYWMRHALTLAKRARDEREVPVGAVLVLNNRVIGEGWNRAIGLHDPTAHAEIMALRQGGLVMQNYRLYDATLYTTFEPCVMCAGAMIHSRIGRVVFGVRNAKTGAAGSLMDVLHHPGMNHRVEITEGILADECAALLCRFYRMPRRVFNAQKKAQSSTDSGGSSGGSSGSETPGTSESATPESSGGSSGGSDKKYSIGLAIGTNSVGWAVITDEYKVPSKKFKVLGNTDRHSIKKNLIGALLFDSGETAEATRLKRTARRRYTRRKNRICYLQEIFSNEMAKVDDSFFHRLEESFLVEEDKKHERHPIFGNIVDEVAYHEKYPTIYHLRKKLVDSTDKADLRLIYLALAHMIKFRGHFLIEGDLNPDNSDVDKLFIQLVQTYNQLFEENPINASGVDAKAILSARLSKSRRLENLIAQLPGEKKNGLFGNLIALSLGLTPNFKSNFDLAEDAKLQLSKDTYDDDLDNLLAQIGDQYADLFLAAKNLSDAILLSDILRVNTEITKAPLSASMIKRYDEHHQDLTLLKALVRQQLPEKYKEIFFDQSKNGYAGYIDGGASQEEFYKFIKPILEKMDGTEELLVKLNREDLLRKQRTFDNGSIPHQIHLGELHAILRRQEDFYPFLKDNREKIEKILTFRIPYYVGPLARGNSRFAWMTRKSEETITPWNFEEVVDKGASAQSFIERMTNFDKNLPNEKVLPKHSLLYEYFTVYNELTKVKYVTEGMRKPAFLSGEQKKAIVDLLFKTNRKVTVKQLKEDYFKKIECFDSVEISGVEDRFNASLGTYHDLLKIIKDKDFLDNEENEDILEDIVLTLTLFEDREMIEERLKTYAHLFDDKVMKQLKRRRYTGWGRLSRKLINGIRDKQSGKTILDFLKSDGFANRNFMQLIHDDSLTFKEDIQKAQVSGQGDSLHEHIANLAGSPAIKKGILQTVKVVDELVKVMGRHKPENIVIEMARENQTTQKGQKNSRERMKRIEEGIKELGSQILKEHPVENTQLQNEKLYLYYLQNGRDMYVDQELDINRLSDYDVDHIVPQSFLKDDSIDNKVLTRSDKNRGKSDNVPSEEVVKKMKNYWRQLLNAKLITQRKFDNLTKAERGGLSELDKAGFIKRQLVETRQITKHVAQILDSRMNTKYDENDKLIREVKVITLKSKLVSDFRKDFQFYKVREINNYHHAHDAYLNAVVGTALIKKYPKLESEFVYGDYKVYDVRKMIAKSEQEIGKATAKYFFYSNIMNFFKTEITLANGEIRKRPLIETNGETGEIVWDKGRDFATVRKVLSMPQVNIVKKTEVQTGGFSKESIRPKRNSDKLIARKKDWDPKKYGGFVSPTVAYSVLVVAKVEKGKSKKLKSVKELLGITIMERSSFEKNPIDFLEAKGYKEVKKDLIIKLPKYSLFELENGRKRMLASARFLQKGNELALPSKYVNFLYLASHYEKLKGSPEDNEQKQLFVEQHKHYLDEIIEQISEFSKRVILADANLDKVLSAYNKHRDKPIREQAENIIHLFTLTNLGAPRAFKYFDTTIDRKAYRSTKEVLDATLIHQSITGLYETRIDLSQLGGDEGADKRTADGSEFESPKKKRKV

SEQ ID NO: 457 - protein, 1606 aa, synthetic construct
MKRTADGSEFESPKKKRKVSEVEFSHEYWMRHALTLAKRARDEREVPVGAVLVLNNRVIGEGWNRAIGLHDPTAHAEIMALRQGGLVMQNYRLYDATLYTTFEPCVMCAGAMIHSRIGRVVFGVRNAKTGAAGSLMDVLHHPGMNHRVEITEGILADECAALLCDFYRMPRRVFNAQKKAQSSINSGGSSGGSSGSETPGTSESATPESSGGSSGGSDKKYSIGLAIGTNSVGWAVITDEYKVPSKKFKVLGNTDRHSIKKNLIGALLFDSGETAEATRLKRTARRRYTRRKNRICYLQEIFSNEMAKVDDSFFHRLEESFLVEEDKKHERHPIFGNIVDEVAYHEKYPTIYHLRKKLVDSTDKADLRLIYLALAHMIKFRGHFLIEGDLNPDNSDVDKLFIQLVQTYNQLFEENPINASGVDAKAILSARLSKSRRLENLIAQLPGEKKNGLFGNLIALSLGLTPNFKSNFDLAEDAKLQLSKDTYDDDLDNLLAQIGDQYADLFLAAKNLSDAILLSDILRVNTEITKAPLSASMIKRYDEHHQDLTLLKALVRQQLPEKYKEIFFDQSKNGYAGYIDGGASQEEFYKFIKPILEKMDGTEELLVKLNREDLLRKQRTFDNGSIPHQIHLGELHAILRRQEDFYPFLKDNREKIEKILTFRIPYYVGPLARGNSRFAWMTRKSEETITPWNFEEVVDKGASAQSFIERMTNFDKNLPNEKVLPKHSLLYEYFTVYNELTKVKYVTEGMRKPAFLSGEQKKAIVDLLFKTNRKVTVKQLKEDYFKKIECFDSVEISGVEDRFNASLGTYHDLLKIIKDKDFLDNEENEDILEDIVLTLTLFEDREMIEERLKTYAHLFDDKVMKQLKRRRYTGWGRLSRKLINGIRDKQSGKTILDFLKSDGFANRNFMQLIHDDSLTFKEDIQKAQVSGQGDSLHEHIANLAGSPAIKKGILQTVKVVDELVKVMGRHKPENIVIEMARENQTTQKGQKNSRERMKRIEEGIKELGSQILKEHPVENTQLQNEKLYLYYLQNGRDMYVDQELDINRLSDYDVDHIVPQSFLKDDSIDNKVLTRSDKNRGKSDNVPSEEVVKKMKNYWRQLLNAKLITQRKFDNLTKAERGGLSELDKAGFIKRQLVETRQITKHVAQILDSRMNTKYDENDKLIREVKVITLKSKLVSDFRKDFQFYKVREINNYHHAHDAYLNAVVGTALIKKYPKLESEFVYGDYKVYDVRKMIAKSEQEIGKATAKYFFYSNIMNFFKTEITLANGEIRKRPLIETNGETGEIVWDKGRDFATVRKVLSMPQVNIVKKTEVQTGGFSKESIRPKRNSDKLIARKKDWDPKKYGGFVSPTVAYSVLVVAKVEKGKSKKLKSVKELLGITIMERSSFEKNPIDFLEAKGYKEVKKDLIIKLPKYSLFELENGRKRMLASARFLQKGNELALPSKYVNFLYLASHYEKLKGSPEDNEQKQLFVEQHKHYLDEIIEQISEFSKRVILADANLDKVLSAYNKHRDKPIREQAENIIHLFTLTNLGAPRAFKYFDTTIDRKAYRSTKEVLDATLIHQSITGLYETRIDLSQLGGDEGADKRTADGSEFESPKKKRKV

SEQ ID NO: 458 - protein, 1588 aa, synthetic construct
MSEVEFSHEYWMRHALTLAKRARDEREVPVGAVLVLNNRVIGEGWNRAIGLHDPTAHAEIMALRQGGLVMQNYRLYDATLYTTFEPCVMCAGAMIHSRIGRVVFGVRNAKTGAAGSLMDVLHHPGMNHRVEITEGILADECAALLCRFFRMPRRVFNAQKKAQSSTDSGGSSGGSSGSETPGTSESATPESSGGSSGGSDKKYSIGLAIGTNSVGWAVITDEYKVPSKKFKVLGNTDRHSIKKNLIGALLFDSGETAEATRLKRTARRRYTRRKNRICYLQEIFSNEMAKVDDSFFHRLEESFLVEEDKKHERHPIFGNIVDEVAYHEKYPTIYHLRKKLVDSTDKADLRLIYLALAHMIKFRGHFLIEGDLNPDNSDVDKLFIQLVQTYNQLFEENPINASGVDAKAILSARLSKSRRLENLIAQLPGEKKNGLFGNLIALSLGLTPNFKSNFDLAEDAKLQLSKDTYDDDLDNLLAQIGDQYADLFLAAKNLSDAILLSDILRVNTEITKAPLSASMIKRYDEHHQDLTLLKALVRQQLPEKYKEIFFDQSKNGYAGYIDGGASQEEFYKFIKPILEKMDGTEELLVKLNREDLLRKQRTFDNGSIPHQIHLGELHAILRRQEDFYPFLKDNREKIEKILTFRIPYYVGPLARGNSRFAWMTRKSEETITPWNFEEVVDKGASAQSFIERMTNFDKNLPNEKVLPKHSLLYEYFTVYNELTKVKYVTEGMRKPAFLSGEQKKAIVDLLFKTNRKVTVKQLKEDYFKKIECFDSVEISGVEDRFNASLGTYHDLLKIIKDKDFLDNEENEDILEDIVLTLTLFEDREMIEERLKTYAHLFDDKVMKQLKRRRYTGWGRLSRKLINGIRDKQSGKTILDFLKSDGFANRNFMQLIHDDSLTFKEDIQKAQVSGQGDSLHEHIANLAGSPAIKKGILQTVKVVDELVKVMGRHKPENIVIEMARENQTTQKGQKNSRERMKRIEEGIKELGSQILKEHPVENTQLQNEKLYLYYLQNGRDMYVDQELDINRLSDYDVDHIVPQSFLKDDSIDNKVLTRSDKNRGKSDNVPSEEVVKKMKNYWRQLLNAKLITQRKFDNLTKAERGGLSELDKAGFIKRQLVETRQITKHVAQILDSRMNTKYDENDKLIREVKVITLKSKLVSDFRKDFQFYKVREINNYHHAHDAYLNAVVGTALIKKYPKLESEFVYGDYKVYDVRKMIAKSEQEIGKATAKYFFYSNIMNFFKTEITLANGEIRKRPLIETNGETGEIVWDKGRDFATVRKVLSMPQVNIVKKTEVQTGGFSKESILPKRNSDKLIARKKDWDPKKYGGFLWPTVAYSVLVVAKVEKGKSKKLKSVKELLGITIMERSSFEKNPIDFLEAKGYKEVKKDLIIKLPKYSLFELENGRKRMLASAKQLQKGNELALPSKYVNFLYLASHYEKLKGSPEDNEQKQLFVEQHKHYLDEIIEQISEFSKRVILADANLDKVLSAYNKHRDKPIREQAENIIHLFTLTNLGAPAAFKYFDTTIDRKQYRSTKEVLDATLIHQSITGLYETRIDLSQLGGDEGADKRTADGSEFESPKKKRKV

SEQ ID NO: 459 - protein, 1606 aa, synthetic construct
MKRTADGSEFESPKKKRKVSEVEFSHEYWMRHALTLAKRARDEREVPVGAVLVLNNRVIGEGWNRAIGLHDPTAHAEIMALRQGGLVMQNYRLYDATLYTTFEPCVMCAGAMIHSRIGRVVFGVRNAKTGAAGSLMDVLHHPGMNHRVEITEGILADECAALLCRFFRMPRRVFNAQKKAQSSTDSGGSSGGSSGSETPGTSESATPESSGGSSGGSDKKYSIGLAIGTNSVGWAVITDEYKVPSKKFKVLGNTDRHSIKKNLIGALLFDSGETAEATRLKRTARRRYTRRKNRICYLQEIFSNEMAKVDDSFFHRLEESFLVEEDKKHERHPIFGNIVDEVAYHEKYPTIYHLRKKLVDSTDKADLRLIYLALAHMIKFRGHFLIEGDLNPDNSDVDKLFIQLVQTYNQLFEENPINASGVDAKAILSARLSKSRRLENLIAQLPGEKKNGLFGNLIALSLGLTPNFKSNFDLAEDAKLQLSKDTYDDDLDNLLAQIGDQYADLFLAAKNLSDAILLSDILRVNTEITKAPLSASMVKRYDEHHQDLTLLKALVRQQLPEKYKEIFFDQSKNGYAGYIDGGASQEEFYKFIKPILEKMDGTEELLVKLNREDLLRKQRTFDNGIIPHQIHLGELHAILRRQGDFYPFLKDNREKIEKILTFRIPYYVGPLARGNSRFAWMTRKSEETITPWNFEEVVDKGASAQSFIERMTNFDKNLPNEKVLPKHSLLYEYFTVYNELTKVKYVTEGMRKPAFLSGEQKKAIVDLLFKTNRKVTVKQLKEDYFKKIECFDSVEISGVEDRFNASLGTYHDLLKIIKDKDFLDNEENEDILEDIVLTLTLFEDREMIEERLKTYAHLFDDKVMKQLKRLRYTGWGRLSRKLINGIRDKQSGKTILDFLKSDGFANRNFMQLIHDDSLTFKEDIQKAQVSGQGDSLHEHIANLAGSPAIKKGILQTVKVVDELVKVMGGHKPENIVIEMARENQTTQKGQKNSRERMKRIEEGIKELGSQILKEHPVENTQLQNEKLYLYYLQNGRDMYVDQELDINRLSDYDVDHIVPQSFLKDDSIDNKVLTRSDKNRGKSDNVPSEEVVKKMKNYWRQLLNAKLITQRKFDNLTKAERGGLSELDKAGFIKRQLVETRQITKHVAQILDSRMNTKYDENDKLIREVKVITLKSKLVSDFRKDFQFYKVREINNYHHAHDAYLNAVVGTALIKKYPKLESEFVYGDYKVYDVRKMIAKSEQEIGKATAKYFFYSNIMNFFKTEITLANGEIRKRPLIETNGETGEIVWDKGRDFATVRKVLSMPQVNIVKKTEVQTGGFSKESILPKGNSDKLIARKKDWDPKKYGGFNSPTVAYSVLVVAKVEKGKSKKLKSVKELLGITIMERSSFEKNPIGFLEAKGYKEVKKDLIIKLPKYSLFELENGRKRMLASASVLHKGNELALPSKYVNFLYLASHYEKLKGSSEDNKQKQLFVEQHKHYLDEIIEQISEFSKRVILADANLDKVLSAYNKHRDKPIREQAENIIHLFTLTNLGASAAFKYFDTTIGRKLYTSTKEVLDATLIHQSITGLYETRIDLSQLGGDEGADKRTADGSEFESPKKKRKV

SEQ ID NO: 460 - protein, 1606 aa, synthetic construct
MKRTADGSEFESPKKKRKVSEVEFSHEYWMRHALTLAKRARDEREVPVGAVLVLNNRVIGEGWNRAIGLHDPTAHAEIMALRQGGLVMQNYRLYDATLYTTFEPCVMCAGAMIHSRIGRVVFGVRNAKTGAAGSLMDVLHHPGMNHRVEITEGILADECAALLCRFYRMPRRVFNAQKKAQSSTDSGGSSGGSSGSETPGTSESATPESSGGSSGGSDKKYSIGLAIGTNSVGWAVITDEYKVPSKKFKVLGNTDRHSIKKNLIGALLFDSGETAEATRLKRTARRRYTRRKNRICYLQEIFSNEMAKVDDSFFHRLEESFLVEEDKKHERHPIFGNIVDEVAYHEKYPTIYHLRKKLVDSTDKADLRLIYLALAHMIKFRGHFLIEGDLNPDNSDVDKLFIQLVQTYNQLFEENPINASGVDAKAILSARLSKSRRLENLIAQLPGEKKNGLFGNLIALSLGLTPNFKSNFDLAEDAKLQLSKDTYDDDLDNLLAQIGDQYADLFLAAKNLSDAILLSDILRVNTEITKAPLSASMVKRYDEHHQDLTLLKALVRQQLPEKYKEIFFDQSKNGYAGYIDGGASQEEFYKFIKPILEKMDGTEELLVKLNREDLLRKQRTFDNGIIPHQIHLGELHAILRRQGDFYPFLKDNREKIEKILTFRIPYYVGPLARGNSRFAWMTRKSEETITPWNFEEVVDKGASAQSFIERMTNFDKNLPNEKVLPKHSLLYEYFTVYNELTKVKYVTEGMRKPAFLSGEQKKAIVDLLFKTNRKVTVKQLKEDYFKKIECFDSVEISGVEDRFNASLGTYHDLLKIIKDKDFLDNEENEDILEDIVLTLTLFEDREMIEERLKTYAHLFDDKVMKQLKRLRYTGWGRLSRKLINGIRDKQSGKTILDFLKSDGFANRNFMQLIHDDSLTFKEDIQKAQVSGQGDSLHEHIANLAGSPAIKKGILQTVKVVDELVKVMGGHKPENIVIEMARENQTTQKGQKNSRERMKRIEEGIKELGSQILKEHPVENTQLQNEKLYLYYLQNGRDMYVDQELDINRLSDYDVDHIVPQSFLKDDSIDNKVLTRSDKNRGKSDNVPSEEVVKKMKNYWRQLLNAKLITQRKFDNLTKAERGGLSELDKAGFIKRQLVETRQITKHVAQILDSRMNTKYDENDKLIREVKVITLKSKLVSDFRKDFQFYKVREINNYHHAHDAYLNAVVGTALIKKYPKLESEFVYGDYKVYDVRKMIAKSEQEIGKATAKYFFYSNIMNFFKTEITLANGEIRKRPLIETNGETGEIVWDKGRDFATVRKVLSMPQVNIVKKTEVQTGGFSKESILPKGNSDKLIARKKDWDPKKYGGFNSPTVAYSVLVVAKVEKGKSKKLKSVKELLGITIMERSSFEKNPIGFLEAKGYKEVKKDLIIKLPKYSLFELENGRKRMLASASVLHKGNELALPSKYVNFLYLASHYEKLKGSSEDNKQKQLFVEQHKHYLDEIIEQISEFSKRVILADANLDKVLSAYNKHRDKPIREQAENIIHLFTLTNLGASAAFKYFDTTIGRKLYTSTKEVLDATLIHQSITGLYETRIDLSQLGGDEGADKRTADGSEFESPKKKRKV

SEQ ID NO: 461 - protein, 1606 aa, synthetic construct
MKRTADGSEFESPKKKRKVSEVEFSHEYWMRHALTLAKRARDEREVPVGAVLVLNNRVIGEGWNRAIGLHDPTAHAEIMALRQGGLVMQNYRLYDATLYTTFEPCVMCAGAMIHSRIGRVVFGVRNAKTGAAGSLMDVLHHPGMNHRVEITEGILADECAALLCDFYRMPRRVFNAQKKAQSSINSGGSSGGSSGSETPGTSESATPESSGGSSGGSDKKYSIGLAIGTNSVGWAVITDEYKVPSKKFKVLGNTDRHSIKKNLIGALLFDSGETAEATRLKRTARRRYTRRKNRICYLQEIFSNEMAKVDDSFFHRLEESFLVEEDKKHERHPIFGNIVDEVAYHEKYPTIYHLRKKLVDSTDKADLRLIYLALAHMIKFRGHFLIEGDLNPDNSDVDKLFIQLVQTYNQLFEENPINASGVDAKAILSARLSKSRRLENLIAQLPGEKKNGLFGNLIALSLGLTPNFKSNFDLAEDAKLQLSKDTYDDDLDNLLAQIGDQYADLFLAAKNLSDAILLSDILRVNTEITKAPLSASMVKRYDEHHQDLTLLKALVRQQLPEKYKEIFFDQSKNGYAGYIDGGASQEEFYKFIKPILEKMDGTEELLVKLNREDLLRKQRTFDNGIIPHQIHLGELHAILRRQGDFYPFLKDNREKIEKILTFRIPYYVGPLARGNSRFAWMTRKSEETITPWNFEEVVDKGASAQSFIERMTNFDKNLPNEKVLPKHSLLYEYFTVYNELTKVKYVTEGMRKPAFLSGEQKKAIVDLLFKTNRKVTVKQLKEDYFKKIECFDSVEISGVEDRFNASLGTYHDLLKIIKDKDFLDNEENEDILEDIVLTLTLFEDREMIEERLKTYAHLFDDKVMKQLKRLRYTGWGRLSRKLINGIRDKQSGKTILDFLKSDGFANRNFMQLIHDDSLTFKEDIQKAQVSGQGDSLHEHIANLAGSPAIKKGILQTVKVVDELVKVMGGHKPENIVIEMARENQTTQKGQKNSRERMKRIEEGIKELGSQILKEHPVENTQLQNEKLYLYYLQNGRDMYVDQELDINRLSDYDVDHIVPQSFLKDDSIDNKVLTRSDKNRGKSDNVPSEEVVKKMKNYWRQLLNAKLITQRKFDNLTKAERGGLSELDKAGFIKRQLVETRQITKHVAQILDSRMNTKYDENDKLIREVKVITLKSKLVSDFRKDFQFYKVREINNYHHAHDAYLNAVVGTALIKKYPKLESEFVYGDYKVYDVRKMIAKSEQEIGKATAKYFFYSNIMNFFKTEITLANGEIRKRPLIETNGETGEIVWDKGRDFATVRKVLSMPQVNIVKKTEVQTGGFSKESILPKGNSDKLIARKKDWDPKKYGGFNSPTVAYSVLVVAKVEKGKSKKLKSVKELLGITIMERSSFEKNPIGFLEAKGYKEVKKDLIIKLPKYSLFELENGRKRMLASASVLHKGNELALPSKYVNFLYLASHYEKLKGSSEDNKQKQLFVEQHKHYLDEIIEQISEFSKRVILADANLDKVLSAYNKHRDKPIREQAENIIHLFTLTNLGASAAFKYFDTTIGRKLYTSTKEVLDATLIHQSITGLYETRIDLSQLGGDEGADKRTADGSEFESPKKKRKV

SEQ ID NO: 462 - protein, 1594 aa, synthetic construct
MKRTADGSEFESPKKKRKVDKKYSIGLAIGTNSVGWAVITDEYKVPSKKFKVLGNTDRHSIKKNLIGALLFDSGETAEATRLKRTARRRYTRRKNRICYLQEIFSNEMAKVDDSFFHRLEESFLVEEDKKHERHPIFGNIVDEVAYHEKYPTIYHLRKKLVDSTDKADLRLIYLALAHMIKFRGHFLIEGDLNPDNSDVDKLFIQLVQTYNQLFEENPINASGVDAKAILSARLSKSRRLENLIAQLPGEKKNGLFGNLIALSLGLTPNFKSNFDLAEDAKLQLSKDTYDDDLDNLLAQIGDQYADLFLAAKNLSDAILLSDILRVNTEITKAPLSASMIKRYDEHHQDLTLLKALVRQQLPEKYKEIFFDQSKNGYAGYIDGGASQEEFYKFIKPILEKMDGTEELLVKLNREDLLRKQRTFDNGSIPHQIHLGELHAILRRQEDFYPFLKDNREKIEKILTFRIPYYVGPLARGNSRFAWMTRKSEETITPWNFEEVVDKGASAQSFIERMTNFDKNLPNEKVLPKHSLLYEYFTVYNELTKVKYVTEGMRKPAFLSGEQKKAIVDLLFKTNRKVTVKQLKEDYFKKIECFDSVEISGVEDRFNASLGTYHDLLKIIKDKDFLDNEENEDILEDIVLTLTLFEDREMIEERLKTYAHLFDDKVMKQLKRRRYTGWGRLSRKLINGIRDKQSGKTILDFLKSDGFANRNFMQLIHDDSLTFKEDIQKAQVSGQGDSLHEHIANLAGSPAIKKGILQTVKVVDELVKVMGRHKPENIVIEMARENQTTQKGQKNSRERMKRIEEGIKELGSQILKEHPVENTQLQNEKLYLYYLQNGRDMYVDQELDINRLSDYDVDHIVPQSFLKDDSIDNKVLTRSDKNRGKSDNVPSEEVVKKMKNYWRQLLNAKLITQRKFDNLTKAERGGLSELDKAGFIKRQLVETRQITKHVAQILDSRMNTKYDENDKLIREVKVITLKSKLVSDFRKDFQFYKVREINNYHHAHDAYLNAVVGTALIKKYPKLESEFVYGDYKVYDVRKMIAKSEQEIGSSGSETPGTSESATPESSGSEVEFSHEYWMRHALTLAKRARDEREVPVGAVLVLNNRVIGEGWNRAIGLHDPTAHAEIMALRQGGLVMQNYRLYDATLYSTFEPCVMCAGAMIHSRIGRVVFGVRNAKTGAAGSLMDVLHHPGMNHRVEITEGILADECAALLCRFFRMPRRVFNAQKKAQSSTDGKATAKYFFYSNIMNFFKTEITLANGEIRKRPLIETNGETGEIVWDKGRDFATVRKVLSMPQVNIVKKTEVQTGGFSKESILPKRNSDKLIARKKDWDPKKYGGFDSPTVAYSVLVVAKVEKGKSKKLKSVKELLGITIMERSSFEKNPIDFLEAKGYKEVKKDLIIKLPKYSLFELENGRKRMLASAGELQKGNELALPSKYVNFLYLASHYEKLKGSPEDNEQKQLFVEQHKHYLDEIIEQISEFSKRVILADANLDKVLSAYNKHRDKPIREQAENIIHLFTLTNLGAPAAFKYFDTTIDRKRYTSTKEVLDATLIHQSITGLYETRIDLSQLGGDEGADKRTADGSEFESPKKKRKV

SEQ ID NO: 463 - protein, 1380 aa, synthetic construct
MKKPYSIGLDIGTNSVGWAVITDDYKVPAKKMKVLGNTDRSHIKKNLIGALLFDAGNTAEDRRLKRTARRRYTRRRNRILYLQEIFAEEMNKIDESFFHRLDDSFLVPEDKRGSKYPIFATLQEEKEYHKQFPTIYHLRKQLAESNEKADLRLVYLALAHMIKYRGHFLIDDPKFKVQNNDIQGLFEKFVEEYDNVQETSLSKIKLNVTEILTAKIPKSEKQEQLLKNYPSEKKNTLFGNLIGLALGLTPNFKTNFSLENDAKLQISSESYEEDLGSLLALIGENFIELFSAVKNLSDGILLAGIVSDESPHAPLSTKMVIRFKEHEEDLAALKHFIKANLPEKYDEVFSDDSKNGYAGYVGVDSKVRKRNGKLATEEEFYKYLKDILNNVKGADYFLEKIKREDLLRKQRTFDNGTIPYQVHLEEMKAILQNQGEYYPFLKENKEKIQQILTFRIPYYVGPLARGNRDFAWLTRNSDQAIRPWNFEEVVDKASSAEDFINKMTNYDLYLPEEKVLPKHSLLYETFAVYNELTKVKFIAEGLRDYQFLDSGQKKQIVNQLFKEKRKVTEKDIIHYLHNVDGYDGIELKGIEKQFNASLSTYHDLLKIIKDKEFMDDPKNEEILENIVHTLTIFEDREMIKQRLAQYDSLFDEKVIKALTRRHYTGWGKLSAKLINGICDKQTNKTILDFLIDDDKINRNFMQLINDDGLSFKDIIQKAQVVGKIDDVKQVVQELPGSPAIKKGILQSIKIVDELVKVMGHAPESIVIEMARENQTTARGKKNSQQRYKRIEDALKNLAPGLDSNILKENPTDNIQLQNDRLFLYYLQNGKDMYTGEALDINQLSNYDIDHIVPQAFIKDDSLDNRVLTSSKDNRGKSDNVPSIEVVQKRKAFWQQLLDSKLISERKFNNLTKAERGGLDERDKVGFIKRQLVETRQITKHVAQILDARFNTEVNEKNQKIRKVKIITLKSNLVSNFRKEFGLYKVREINDYHHAHDAYLNAVVAKAILKKYPKLEPEFVYGDYQKYDLKRYISRSKDPKEIEKATEKYFFYSNLLNFFKEEVHYADGTIIKRENIEYSKDTGEIAWNKEKDFATVRKVLSCPQVNIVKKTEVQTGGFSKESILPKRNSDKLIARKKDWDPKKYGGFDSPTVAYSVLVVAKVEKGKSKKLKSVKELVGITIMERSSFEKDPVDFLEAKGYKEVRKDLIIKLPKYSLFELENGRKRMLASAGELQKGNELALPSKYVNFLYLASHYEKLKGSPEDNEQKQLFVEQHKHYLDEIIEQISEFSKRVILADANLDKVLSAYNKHRDKPIREQAENIIHLFTLTNLGAPAAFKYFDTTIDRKRYTSTKEVLDATLIHQSITGLYETRIDLSQLGGD

SEQ ID NO: 464 - DNA, 4140 bp, synthetic construct
  source 1..4140: mol_type = other DNA
atgaagaagccttattccatcggcttggacatcgggactaactccgtcggatgggctgtgattaccgacgactacaaggttcccgcaaaaaagatgaaagtgctcggcaatacagatcggtcacatattaagaagaacctgattggcgctctgcttttcgatgcaggtaatactgccgaggataggcgcctcaagagaacagcccggcgtagatacactcgcagaaggaaccggattctgtacctgcaagaaatttttgctgaagaaatgaataagatcgatgagtcattcttccaccgactggacgatagtttcctggtacctgaagacaaaaggggatccaagtaccccatttttgccacactccaagaagagaaggagtaccacaagcaatttccgaccatctaccaccttaggaagcagctggcagagtccaacgaaaaggcagacttgcggttagtctacctggctcttgcacacatgataaagtaccggggacatttcttaattgacgaccctaagtttaaagttcagaataacgatattcaaggcctcttcgaaaagtttgttgaggaatatgataacgtacaagaaacctctttgtctaaaattaagctcaatgtgactgagatcctcacagcaaagattcccaaaagcgagaaacaagagcaactcctgaagaactaccctagtgagaaaaagaacaccctttttggcaatctgatcgggctcgccctgggcctgacacctaacttcaaaacaaatttctccctggagaacgacgccaagctgcaaatctcatccgagagttacgaggaagacttaggatctctcctcgcactgattggagaaaacttcattgaactcttctccgccgtgaaaaatctgagtgacggcatccttctggccggaatcgtctctgacgagagtccccacgcgccgctgagcacaaagatggtcatccggttcaaagagcacgaagaagatctcgcggcactcaaacatttcatcaaagccaacttgccagaaaaatacgatgaagtattctccgacgatagcaaaaacggctatgcgggatacgtaggagtcgacagcaaggtgcggaagcgcaatggtaagcttgctacagaagaagaattttacaagtaccttaaagatatcctcaataatgttaagggggccgactacttcctcgaaaagatcaaaagggaggacctgttgaggaaacagcgtacctttgacaacggcacaatcccgtaccaggtgcacctcgaagaaatgaaagccattctgcagaaccagggggaatactatccattcctcaaggaaaacaaggaaaaaatccagcagatccttacgtttaggattccttactatgtgggccctttggcaaggggtaaccgggatttcgcttggctcaccaggaatagtgaccaggccataaggccctggaactttgaagaagtcgtcgacaaggcctcttccgccgaagacttcattaacaaaatgactaactacgatctctacctgccagaggaaaaagtccttccaaaacatagcctgctttacgaaaccttcgccgtatacaacgagcttacaaaagtcaagttcatcgcagagggtctcagggattaccaattccttgactctggccaaaaaaagcagatcgtgaatcaacttttcaaggagaaacgaaaggtgactgaaaaggacatcattcactacctgcacaacgtcgatggatacgacgggattgaactgaagggcatagaaaagcagttcaatgctagtttgtccacgtaccacgatctgcttaaaatcattaaggataaggaattcatggatgaccctaagaacgaagagattttggaaaacatcgtccacaccctgaccattttcgaggatagggagatgataaagcaacggctggcacagtacgactcactttttgacgagaaggtgataaaagcccttacaagaaggcattataccgggtggggcaagctctccgctaagctgatcaatggtatttgcgacaagcagaccaataagactattttggacttcctgattgacgatgataagataaaccgaaactttatgcagctgattaatgatgatggactgagctttaaagatatcattcagaaggcccaggtcgtcggcaagatcgacgacgtcaaacaggtggtgcaggaacttccaggatccccggccattaagaagggaatattacagtccatcaaaattgtggatgagctggtgaaagtcatgggacatgcacctgagtctatcgtcatagagatggctcgtgaaaaccagacgacagcccgaggaaagaagaacagccaacaacggtataaacggatcgaggatgcacttaagaatctggccccggggctggattctaatatcttaaaagaaaatccaaccgataatattcaacttcagaacgaccggctttttctgtattaccttcagaatggaaaagatatgtataccggagaagccctggatataaatcagctgagtaactatgatatcgaccacattgtgcctcaggctttcattaaggatgacagcctggacaatcgcgtactcacatcctccaaggacaacagaggcaagagcgataacgtccctagcatcgaagtggtacaaaagcgtaaggccttctggcagcagctcttagactctaaattgataagcgaacggaaattcaataacctcacaaaggccgagcgtggtggcttggacgagagagacaaggtgggcttcattaaacggcagctcgtggaaaccagacagataaccaagcacgttgcccagatcctcgatgccaggttcaacaccgaagttaacgagaaaaaccaaaagattcggaaagtgaagatcatcactctcaagtctaatttggtgtccaactttagaaaagagtttggactctataaggtccgagagattaatgattatcaccacgctcacgatgcctacctcaacgcagtggtggccaaggccatcctgaaaaaatatcctaagctcgagcctgagttcgtctatggtgactatcagaagtacgacctcaagcgctatattagtaggagcaaggatcctaaagagatcgaaaaggccacagaaaagtacttcttttacagcaacttactcaacttcttcaaagaagaagtccactacgctgatggcaccatcatcaagcgagaaaatatagagtacagtaaggacacaggcgaaatcgcctggaataaagagaaggatttcgctactgtgcgaaaagttctgtcttgcccccaggtgaacattgtgaaaaagactgaggtgcagactggcgggtttagcaaagagagtatcctgccaaagcggaatagcgataagttaattgctcggaaaaaggactgggatccaaagaagtacggcggcttcgattccccaaccgttgcctacagcgtcctcgtcgtcgccaaggtggagaagggtaaaagcaagaagctgaaaagtgtaaaggaactggtcggcattaccattatggagcggagttccttcgaaaaggatccagttgattttttagaagccaaggggtataaggaggtgcgcaaggatttaattattaaactccccaagtacagcctgtttgagctggagaacggaaggaagaggatgctggctagcgccggcgagctccaaaagggcaatgagctcgccctgccaagcaagtacgtgaactttctctatctggctagccactacgagaagctgaagggatcacctgaagacaatgagcagaaacagctgttcgtcgagcagcataaacactacctcgacgaaattattgagcaaattagtgagttctcaaagcgggtaatcctcgcagatgcaaatctggataaagtgttaagcgcgtataataagcaccgggacaaaccaatccgggagcaagccgagaacatcattcatctcttcacactgaccaatcttggggctcctgcagcttttaaatatttcgatacaaccatcgacaggaagcgatatacttctacaaaggaagtgcttgatgcaactctcatccatcaaagcatcacggggctgtatgaaacccggattgacctgagtcagctgggtggggac

SEQ ID NO: 465 - RNA, 86 nt, synthetic construct
  source 1..86: mol_type = other RNA
gttttagagctgtgttgaaaaacacagcaagttaaaataaggctttgtccgtatccaacttgaaaaagtgagcaccgattcggtgc

SEQ ID NO: 466 - RNA, 78 nt, synthetic construct
  source 1..78: mol_type = other RNA
gttttagagctggaaacagcaagttaaaataaggctttgtccgtatccaacttgaaaaagtgagcaccgattcggtgc

SEQ ID NO: 467 - RNA, 76 nt, synthetic construct; identical to SEQ ID NO: 319
  source 1..76: mol_type = other RNA

SEQ ID NO: 468 - protein, 12 aa, synthetic construct
EGGSEEEEESGS

SEQ ID NO: 469 - protein, 12 aa, synthetic construct
KGPKPKKEESEK

SEQ ID NO: 470 - protein, 166 aa, synthetic construct
SEVEFSHEYWMRHALTLAKRARDEREVPVGAVLVLNNRVIGEGWNRAIGLHDPTAHAEIMALRQGGLVMQNYRLIDATLYVTFEPCVMCAGAMIHSRIGRVVFGVRNSKRGAAGSLMNVLNYPGMNHRVEITEGILADECAALLCDFYRMPRQVFNAQKKAQSSIN

SEQ ID NO: 471 - protein, 166 aa, synthetic construct
SEVEFSHEYWMRHALTLAKRARDEGEVPVGAVLVLNNRVIGEGWNRAIGLYDPTAHAEIMALRQGGLVMQNYRLIDATLYVTFEPCVMCAGAMIHSRIGRVVFGVRNSKRGAAGSLMNVLNYPGMDHRVEITEGILADECAALLCDFYRMPRQVFNAQKKAQSSIN

SEQ ID NO: 472 - protein, 166 aa, synthetic construct
SEVEFSHEYWMRHALTLAKRARDEGEVPVGAVLVLNNRVIGEGWNRAIGLHDPTAHAEIMALRQGGLVMQNYRLIDATLYVTFEPCVMCAGAMIHSRIGRVVFGVRNSKRGAAGSLMNVLNYPGMDHRVEITEGILADECAALLCDFYRMPRQVFNAQKKAQSSIN

SEQ ID NO: 473 - protein, 166 aa, synthetic construct
SEVEFSHEYWMRHALTLAKRARDEREVPVGAVLVLNNRVIGEGWNRAIGLHDPTAHAEIMALRQGGLVMQNYGLIDATLYVTFEPCVMCAGAIIHSRIGRVVFGVRNSKRGAAGSLMNVLNYPGMNHRVEITEGILADECAALLCDFYRMPRQVFNAQKKAQSSIN

SEQ ID NO: 474 - protein, 166 aa, synthetic construct
SEVEFSHEYWMRHALTLAKRARDEREVPVGAVLVLNNRVIGEGWNRAIGLHDPTAHAEIMALRQGGLVMQNYRLIDATLYVTFEPCVMCAGAMIHSRIGRVVFGVRNSKRGAAGSLMNVLNYPGMDHRVEITEGILADECAALLCDFYRMPRQVFNAQKKAQSSIN

SEQ ID NO: 475 - protein, 166 aa, synthetic construct
SEVEFSHEYWMRHALTLAKRARDEGEVPVGAVLVLNNRVIGEGWNRAIGLYDPTAHAEIMALRQGGLVMQNYGLIDATLYVTFEPCVMCAGAMIHSRIGRVVFGVRNSKRGAAGSLMNVLNYPGMDHRVEITEGILADECAALLCDFYRMPRQVFNAQKKAQSSIN

SEQ ID NO: 476 - protein, 166 aa, synthetic construct
SEVEFSHEYWMRHALTLAKRARDEGEVPVGAVLVLNNRVIGEGWNRAIGLYDPTAHAEIMALRQGGLVMQNYGLIDATLYSTFEPCVMCAGAMIHSRIGRVVFGVRNSKRGAAGSLMNVLNYPGMDHRVEITEGILADECAALLCDFYRMPRRVFNAQKKAQSSIN

SEQ ID NO: 477 - protein, 166 aa, synthetic construct
SEVEFSHEYWMRHALTLAKRARDEGEVPVGAVLVLNNRVIGEGWNRAIGLYDPTAHAEIMALRQGGLVMQNYRLIDATLYVTFEPCVMCAGAMIHSRIGRVVFGVRNSKRGAAGSLMNVLNYPGMDHRVEITEGILANECAALLCDFYRMPRQVFNAQKKAQSSIN

SEQ ID NO: 478 - protein, 166 aa, synthetic construct
SEVEFSHEYWMRHALTLAKRARDEREVPVGAVLVLNNRVIGEGWNRAIGLHDPTAHAEIMALRQGGLVMQNYRLYDATLYSTFEPCVMCAGAMIHSRIGRVVFGVRNAKTGAAGSLMDVLHHPGMNHRVEITEGILADECAALLCRFFRMPRRVFNAQKKAQSSTD

SEQ ID NO: 479 - protein, 160 aa, Staphylococcus aureus; identical to SEQ ID NO: 309

SEQ ID NO: 480 - protein, 161 aa, Bacillus subtilis; identical to SEQ ID NO: 310

SEQ ID NO: 481 - protein, 183 aa, Salmonella enterica; identical to SEQ ID NO: 311
  source 1..183: note = serovar Typhimurium

SEQ ID NO: 482 - protein, 164 aa, Shewanella putrefaciens; identical to SEQ ID NO: 312

SEQ ID NO: 483 - protein, 173 aa, Haemophilus influenzae; identical to SEQ ID NO: 313

SEQ ID NO: 484 - protein, 161 aa, Caulobacter crescentus; identical to SEQ ID NO: 314

SEQ ID NO: 485 - protein, 178 aa, Geobacter sulfurreducens
MSSLKKTPIRDDAYWMGKAIREAAKAAARDEVPIGAVIVRDGAVIGRGHNLREGSNDPSAHAEMIAIRQAARRSANWRLTGATLYVTLEPCLMCMGAIILARLERVVFGCYDPKGAAGSLYDLSADPRLNHQVRLSPGVCQEECGTMLSDFFRDLRRRKKAKATPALFIDERKVPPEP

SEQ ID NO: 486 - protein, 171 aa, Streptococcus pyogenes
MPYSLEEQTYFMQEALKEAEKSLQKAEIPIGCVIVKDGEIIGRGHNAREESNQAIMHAEIMAINEANAHEGNWRLLDTTLFVTIEPCVMCSGAIGLARIPHVIYGASNQKFGGADSLYQILTDERLNHRVQVERGLLAADCANIMQTFFRQGRERKKIAKHLIKEQSDPFD

SEQ ID NO: 487 - protein, 151 aa, Aquifex aeolicus
MGKEYFLKVALREAKRAFEKGEVPVGAIIVKEGEIISKAHNSVEELKDPTAHAEMLAIKEACRRLNTKYLEGCELYVTLEPCIMCSYALVLSRIEKVIFSALDKKHGGVVSVFNILDEPTLNHRVKWEYYPLEEASELLSEFFKKLRNNII

SEQ ID NO: 488 - protein, 178 aa, Escherichia coli
MRRAFITGVFFLSEVEFSHEYWMRHALTLAKRAWDEREVPVGAVLVHNNRVIGEGWNRPIGRHDPTAHAEIMALRQGGLVMQNYRLIDATLYVTLEPCVMCAGAMIHSRIGRVVFGARDAKTGAAGSLMDVLHHPGMNHRVEITEGILADECAALLSDFFRMRRQEIKAQKKAQSSTD

SEQ ID NO: 489 - protein, 167 aa, synthetic construct
MSEVEFSHEYWMRHALTLAKRARDEREVPVGAVLVLNNRVIGEGWNRAIGLHDPTAHAEIMALRQGGLVMQNYRLIDATLYVTFEPCVMCAGAMIHSRIGRVVFGVRNSKRGAAGSLMNVLNYPGMNHRVEITEGILADECAALLCDFYRMPRQVFNAQKKAQSSIN

SEQ ID NO: 490 - protein, 167 aa, synthetic construct
MSEVEFSHEYWMRHALTLAKRARDEGAGPVGAVLVLNNRVIGEGWNRAIGLHDPTAHAEIMALRQGGLVMQNYRLFDATLYVTFEPCVMCAGAMINSRIGRVVFGVRNSKRGAAGSLMNVLNYPGMNHRVEITEGILADECAALLCDFYRMPRQVFNSQKKAQSSIN

SEQ ID NO: 491 - protein, 167 aa, synthetic construct
MSEVEFSHEYWMRHALTLAKRARDEGAGPVGAVLVLNNRVIGEGWNRAIGLHDPTAHAEIMALRQGGLVMQNYRLFDATLYVTFEPCVMCAGAMINSRIGRVVFGVRNSKRGAAGSLMNVLNYPGMNHRVEITEGILADECAALLCDFYRMPRRVFNSQKKAQSSIN

SEQ ID NO: 492 - protein, 167 aa, synthetic construct
MSEVEFSHEYWMRHALTLAKRARDEGAGPVGAVLVLNNRVIGEGWNRAIGLHDPTAHAEIMALRQGGLVMQNYRLFDATLYVTFEPCVMCAGAMINSRIGRVVFGVRNSKRGAAGSLMNVLNYPGMNHRVEITEGILADECAALLCDFYRIPRQVFNSQKKAQSSIN

SEQ ID NO: 493 - protein, 167 aa, synthetic construct
MSEVEFSHEYWMRHALTLAKRARDERKAPVGAVLVLNNRVIGEGWNRAIGLHDPTAHAEIIALRQGGLVMQNYRLIDATLYVTFEPCVMCAGAMINSRIGRVVFGVRNSKRGAAGSLMNVLNYPGMNHRVEITEGILADECAALLCDFYRMPRQVFNAQKKAQSSIN

SEQ ID NO: 494 - protein, 167 aa, synthetic construct
MSEVEFSHEYWMRHALTLAKRARDERAGPVGAVLVLNNRVIGEGWNRAIGLHDPTAHAEIMALRQGGLVMQNHRLIDATLYVTFEPCVMCAGAMINSRIGRVVFGVRNSKRGAAGSLMNVLNYPGMNHRVEITEGILADECAALLCDFYRMPRHVFNSQKKAQSSIN

SEQ ID NO: 495 - protein, 167 aa, synthetic construct
MSEVEFSHEYWMRHALTLAKRARDEGEAPVGAVLVLNNRVIGEGWNRRIGLHDPTAHAEIMALRQGGLVMQNSRLIDATLYVTFEPCVMCAGAMINSRIGRVVFGVRNSKRGAAGSLMNVLNYPGMNHRVEITEGILADECAALLCDFYRMPRQVFNAQKKAQSSIN

SEQ ID NO: 496 - protein, 167 aa, synthetic construct
MSEVEFSHEYWMRHALTLAKRARDEGEGPVGAVLVLNNRVIGEGWNRRIGLHDPTAHAEIMALRQGGLVMQNCRLIDATLYVTFEPCVMCAGAMIHSRIGRVVFGVRNSKRGAAGSLMNVLNYPGMNHRVEITEGILADECAALLCDFYRMPRQVFNAQKKAQSSIN

SEQ ID NO: 497 - protein, 167 aa, synthetic construct
MSEVEFSHEYWMRHALTLAKRARDEGEAPVGAVLVLNNRVIGEGWIRRIGLHDPTAHAEIMALRQGGLVMQNPRLIDATLYVTFEPCVMCAGAMINSRIGRVVFGVRNSKRGAAGSLMNVLNYPGMNHRVEITEGILADECAALLCDFYRMPRQVFNAQKKAQSSIN

SEQ ID NO: 498 - protein, 167 aa, synthetic construct
MSEVEFSHEYWMRHALTLAKRARDEGEAPVGAVLVLNNRVIGEGWTRRIGLHDPTAHAEIMALRQGGLVMQNSRLIDATLYVTFEPCVMCAGAMINSRIGRVVFGVRNSKRGAAGSLMNVLNYPGMNHRVEITEGILADECAALLCDFYRMPRHVFNAQKKAQSSIN

SEQ ID NO: 499 - protein, 167 aa, synthetic construct
MSEVEFSHEYWMRHALTLAKRARDEGEAPVGAVLVLNNRVIGEGWTRRIGLHDPTAHAEIMALRQGGLVMQNSRLIDATLYVTFEPCVMCAGAMINSRIGRVVFGVRNSKRGAAGSLMNVLNYPGMNHRVEITEGILADECAALLCDFYRMPRQVFNAQKKAQSSIN

SEQ ID NO: 500 - protein, 167 aa, synthetic construct
MSEVEFSHEYWMRHALTLAKRARDEGEAPVGAVLVLNNRVIGEGWVRRIGLHDPTAHAEIMALRQGGLVMQNSRLIDATLYVTFEPCVMCAGAMINSRIGRVVFGVRNSKRGAAGSLMNVLNYPGMNHRVEITEGILADECAALLCDFYRMPRQVFNAQKKAQSSIN

SEQ ID NO: 501 - protein, 167 aa, synthetic construct
MSEVEFSHEYWMRHALTLAKRARDEGEAPVGAVLVLNNRVIGEGWVRRIGLHDPTAHAEIMALRQGGLVMQNPRLIDATLYVTFEPCVMCAGAMINSRIGRVVFSVRNSKRGAAGSLMNVLNYPGMNHRVEITEGILADECAALLCDFYRMPRQVFNAQKKAQSSIN

SEQ ID NO: 502 - protein, 167 aa, synthetic construct
MSEVEFSHEYWMRHALTLAKRARDEGEAPVGAVLVLNNRVIGEGWLRRIGLHDPTAHAEIMALRQGGLVMQNPRLIDATLYVTFEPCVMCAGAMINSRIGRVVFGVRNSKRGAAGSLMNVLNYPGMNHRVEITEGILADECAALLCDFYRMPRQVFNAQKKAQSSIN

SEQ ID NO: 503 - protein, 167 aa, synthetic construct
MSEVEFSHEYWMRHALTLAKRARDEREAPVGAVLVLNNRVIGEGWLRPIGLHDPTAHAEIMALRQGGLVMQNPRLIDATLYVTFEPCVMCAGAMIHSRIGRVVFGVRNSKRGAAGSLMNVLNYPGMNHRVEITEGILADECAALLCDFYRMPRQVFNAQKKAQSSIN

SEQ ID NO: 504 - protein, 167 aa, synthetic construct
MSEVEFSHEYWMRHALTLAKRARDEGEAPVGAVLVLNNRVIGEGWCRRIGLHDPTAHAEIMALRQGGLVMQNSRLIDATLYVTFEPCVMCAGAMIHSRIGRVVFGVRNSKRGAAGSLMNVLNYPGMNHRVEITEGILADECAALLCDFYRMPRQVFNAQKKAQSSIN

SEQ ID NO: 505 - protein, 167 aa, synthetic construct
MSEVEFSHEYWMRHALTLAKRARDEGEAPVGAVLVLNNRVIGEGWVRRIGLHDPTAHAEIMALRQGGLVMQNPRLIDATLYVTFEPCVMCAGAMINSRIGRVVFGVRNSKRGAAGSLMNVLNYPGMNHRVEITEGILADECAALLCDFYRMPRQVFNAQKKAQSSIN

SEQ ID NO: 506 - protein, 167 aa, synthetic construct
MSEVEFSHEYWMRHALTLAKRARDEGEAPVGAVLVLNNRVIGEGWVRRIGLHDPTAHAEIMALRQGGLVMHNPRLIDATLYVTFEPCVMCAGAMINSRIGRVVFGVRNSKRGAAGSLMNVLNYPGMNHRVEITEGILADECAALLCDFYRMPRQVFNAQKKAQSSIN

SEQ ID NO: 507 - protein, 167 aa, synthetic construct
MSEVEFSHEYWMRHALTLAKRARDEGEAPVGAVLVLNNRVIGEGWLRRIGLHDPTAHAEIMALRQGGLVMQNSRLIDATLYVTFEPCVMCAGAMINSRIGRVVFGVRNSKRGAAGSLMNVLNYPGMNHRVEITEGILADECAALLCDFYRMPRQVFNAQKKAQSSIN

SEQ ID NO: 508 - protein, 167 aa, synthetic construct
MSEVEFSHEYWMRHALTLAKRARDEGEAPVGAVLVLNNRVIGEGWCRRIGLHDPTAHAEIMALRQGGLVMQNPRLIDATLYVTFEPCVMCAGAMINSRIGRVVFGVRNSKRGAAGSLMNVLNYPGMNHRVEITEGILADECAALLCDFYRMPRQVFNAQKKAQSSIN

SEQ ID NO: 509 - protein, 167 aa, synthetic construct
MSEVEFSHEYWMRHALTLAKRARDEGEAPVGAVLVLNNRVIGEGWCRRIGLHDPTAHAEIMALRQGGLVMQNPRLIDATLYVTFEPCVMCAGAMINSRIGRVVFGVRNSKRGAAGSLMNVLNYPGMNHRVEITEGILADECAALLCDFYRMPRQVFNAQKKVQSSIN

SEQ ID NO: 510 - protein, 167 aa, synthetic construct
MSEVEFSHEYWMRHALTLAKRARDEGEAPVGAVLVLNNRVIGEGWIRRIGLHDPTAHAEIMALRQGGLVMQNSRLIDATLYVTFEPCVMCAGAMINSRIGRVVFGVRNSKRGAAGSLMNVLNYPGMNHRVEITEGILADECAALLCDFYRMPRQVFNAQKKAQSSIN

SEQ ID NO: 511 - protein, 167 aa, synthetic construct
MSEVEFSHEYWMRHALTLAKRARDEGEAPVGAVLVLNNRVIGEGWNRRIGLHDPTAHAEIMALRQGGLVMSNSRLIDATLYVTFEPCVMCAGAMINSRIGRVVFGVRNSKRGAAGSLMNVLNYPGMNHRVEITEGILADECAALLCDFYRMPRQVFNAQKKAQSSIN

SEQ ID NO: 512 - protein, 167 aa, synthetic construct
MSEVEFSHEYWMRHALTLAKRARDEGEAPVGAVLVLNNRVIGEGWLRRIGLHDPTAHAEIMALRQGGLVMQNPRLIDATLYVTFEPCVMCAGAMIHSRIGRVVFGVRNSKRGAAGSLMNVLNYPGMNHRVEITEGILADECAALLCDFYRMPRQVFNAQKKAQSSIN

SEQ ID NO: 513 - protein, 167 aa, synthetic construct; identical to SEQ ID NO: 502

SEQ ID NO: 514 - protein, 167 aa, synthetic construct
MSEVEFSHEYWMRHALTLAKRARDEGEAPVGAVLVLNNRVIGEGWNRAIGLHDPTAHAEIMALRQGGLVMQNPRLIDATLYVTFEPCVMCAGAMINSRIGRVVFGVRNSKRGAAGSLMNVLNYPGMNHRVEITEGILADECAALLCDFYRMPRQVFNAQKKAQSSIN

SEQ ID NO: 515 - protein, 167 aa, synthetic construct; identical to SEQ ID NO: 500

SEQ ID NO: 516 - protein, 167 aa, synthetic construct; identical to SEQ ID NO: 505

SEQ ID NO: 517 - protein, 167 aa, synthetic construct
MSEVEFSHEYWMRHALTLAKRARDEGEVPVGAVLVLNNRVIGEGWLRAIGLHDPTAHAEIMALRQGGLVMQNYRLIDATLYVTFEPCVMCAGAMIHSRIGRVVFGVRNSKRGAAGSLMNVLNYPGMNHRVEITEGILADECAALLCDFYRMPRQVFNAQKKAQSSIN

SEQ ID NO: 518 - protein, 167 aa, synthetic construct; identical to SEQ ID NO: 497

SEQ ID NO: 519 - protein, 167 aa, synthetic construct; identical to SEQ ID NO: 501

SEQ ID NO: 520 - protein, 167 aa, synthetic construct
MSEVEFSHEYWMRHALTLAKRARDEGEAPVGAVLVLNNRVIGEGWNRPIGLHDPTAHAEIMALRQGGLVMQNHRLIDAPLYVTFEPCVMCAGAMINSRIGRVVFGVRNSKRGAAGSLMNVLNYPGMNHRVEITEGILADECAALLCDFYRMPRQVFNAQKKAQSSIN

SEQ ID NO: 521 - protein, 167 aa, synthetic construct
MSEVEFSHEYWMRHALTLAKRARDEGEVPVGAVLVLNNRVIGEGWIRAIGLHDPTAHAEIMALRQGGLVMQNYRLIDATLYVTFEPCVMCAGAMINSRIGRVVFGVRNSKRGAAGSLMNVLNYPGMNHRVEITEGILADECAALLCDFYRMPRQVFNAQKKAQSSIN

SEQ ID NO: 522 - protein, 167 aa, synthetic construct; identical to SEQ ID NO: 505

SEQ ID NO: 523 - protein, 167 aa, synthetic construct; identical to SEQ ID NO: 507

SEQ ID NO: 524 - protein, 167 aa, synthetic construct
MSEVEFSHEYWMRHALTLAKRARDEGEAPVGAVLVLNNRVIGEGWCRRIGLHDPTAHAEIMALRQGGLVMQNYRLIDATLYVTFEPCVMCAGAMINSRIGRVVFGVRNSKRGAAGSLMNVLNYPGMNHRVEITEGILADECAALLCDFYRMPRQVFNAQKKVQSSIN

SEQ ID NO: 525 - protein, 167 aa, synthetic construct; identical to SEQ ID NO: 506

SEQ ID NO: 526 - protein, 167 aa, synthetic construct; identical to SEQ ID NO: 508

SEQ ID NO: 527 - protein, 167 aa, synthetic construct; identical to SEQ ID NO: 509

SEQ ID NO: 528 - protein, 167 aa, synthetic construct; identical to SEQ ID NO: 505

SEQ ID NO: 529 - protein, 167 aa, synthetic construct; identical to SEQ ID NO: 500

SEQ ID NO: 530 - protein, 167 aa, synthetic construct
MSEVEFSHEYWMRHALTLAKRARDEGEAPVGAVLVLNNRVIGEGWVRPIGLHDPTAHAEIMALRQGGLVMQNSRLIDATLYVTFEPCVMCAGAMINSRIGRVVFGVRNSKRGAAGSLMNVLNYPGMNHRVEITEGILADECAALLCDFYRMPRQVFNAQKKAQSSIN

SEQ ID NO: 531 - protein, 167 aa, synthetic construct; identical to SEQ ID NO: 508

SEQ ID NO: 532 - protein, 167 aa, synthetic construct
MSEVEFSHEYWMRHALTLAKRARDEGEAPVGAVMVLNNRVIGEGWLRRIGLHDPTAHAEIMALRQGGLVMQNPRLIDATLYVTFEPCVMCAGAMINSRIGRVVFGVRNSKRGAAGSLMNVLNYPGMNHRVEITEGILADECAALLCDFYRMPRQVFNAQKKAQSSIN

SEQ ID NO: 533 - protein, 167 aa, synthetic construct; identical to SEQ ID NO: 502

SEQ ID NO: 534 - protein, 167 aa, synthetic construct
MSEVEFSHEYWMRHALTLAKRARDEGEAPVGAVLVLNNRVIGEGWLRPIGLHDPTAHAEIMALKQGGLVMQNPRLIDATLYVTFEPCVMCAGAMINSRIGRVVFGVRNSKRGAAGSLMNVLNYPGMNHRVEITEGILADECAALLCDFYRMPRQVFNAQKKAQSSIN

SEQ ID NO: 535 - protein, 1699 aa, synthetic construct
MKRTADGSEFESPKKKRKVSSEVEFSHEYWMRHALTLAKRARDEGAGPVGAVLVLNNRVIGEGWNRAIGLHDPTAHAEIMALRQGGLVMQNYRLFDATLYVTFEPCVMCAGAMINSRIGRVVFGVRNSKRGAAGSLMNVLNYPGMNHRVEITEGILADECAALLCDFYRMPRQVFNSQKKAQSSINSGGSSGGSSGSETPGTSESATPESSGGSSGGSDKKYSIGLAIGTNSVGWAVITDEYKVPSKKFKVLGNTDRHSIKKNLIGALLFDSGETAEATRLKRTARRRYTRRKNRICYLQEIFSNEMAKVDDSFFHRLEESFLVEEDKKHERHPIFGNIVDEVAYHEKYPTIYHLRKKLVDSTDKADLRLIYLALAHMIKFRGHFLIEGDLNPDNSDVDKLFIQLVQTYNQLFEENPINASGVDAKAILSARLSKSRRLENLIAQLPGEKKNGLFGNLIALSLGLTPNFKSNFDLAEDAKLQLSKDTYDDDLDNLLAQIGDQYADLFLAAKNLSDAILLSDILRVNTEITKAPLSASMIKRYDEHHQDLTLLKALVRQQLPEKYKEIFFDQSKNGYAGYIDGGASQEEFYKFIKPILEKMDGTEELLVKLNREDLLRKQRTFDNGSIPHQIHLGELHAILRRQEDFYPFLKDNREKIEKILTFRIPYYVGPLARGNSRFAWMTRKSEETITPWNFEEVVDKGASAQSFIERMTNFDKNLPNEKVLPKHSLLYEYFTVYNELTKVKYVTEGMRKPAFLSGEQKKAIVDLLFKTNRKVTVKQLKEDYFKKIECFDSVEISGVEDRFNASLGTYHDLLKIIKDKDFLDNEENEDILEDIVLTLTLFEDREMIEERLKTYAHLFDDKVMKQLKRRRYTGWGRLSRKLINGIRDKQSGKTILDFLKSDGFANRNFMQLIHDDSLTFKEDIQKAQVSGQGDSLHEHIANLAGSPAIKKGILQTVKVVDELVKVMGRHKPENIVIEMARENQTTQKGQKNSRERMKRIEEGIKELGSQILKEHPVENTQLQNEKLYLYYLQNGRDMYVDQELDINRLSDYDVDHIVPQSFLKDDSIDNKVLTRSDKNRGKSDNVPSEEVVKKMKNYWRQLLNAKLITQRKFDNLTKAERGGLSELDKAGFIKRQLVETRQITKHVAQILDSRMNTKYDENDKLIREVKVITLKSKLVSDFRKDFQFYKVREINNYHHAHDAYLNAVVGTALIKKYPKLESEFVYGDYKVYDVRKMIAKSEQEIGKATAKYFFYSNIMNFFKTEITLANGEIRKRPLIETNGETGEIVWDKGRDFATVRKVLSMPQVNIVKKTEVQTGGFSKESILPKRNSDKLIARKKDWDPKKYGGFDSPTVAYSVLVVAKVEKGKSKKLKSVKELLGITIMERSSFEKNPIDFLEAKGYKEVKKDLIIKLPKYSLFELENGRKRMLASAGELQKGNELALPSKYVNFLYLASHYEKLKGSPEDNEQKQLFVEQHKHYLDEIIEQISEFSKRVILADANLDKVLSAYNKHRDKPIREQAENIIHLFTLTNLGAPAAFKYFDTTIDRKRYTSTKEVLDATLIHQSITGLYETRIDLSQLGGDSGGSGGSGGSTNLSDIIEKETGKQLVIQESILMLPEEVEEVIGNKPESDILVHTAYDESTDENVMLLTSDAPEYKPWALVIQDSNGENKIKMLSGGSKRTADGSEFEPKKKRKV

SEQ ID NO: 536 - protein, 1699 aa, synthetic construct
MKRTADGSEFESPKKKRKVSSEVEFSHEYWMRHALTLAKRARDEGAGPVGAVLVLNNRVIGEGWNRAIGLHDPTAHAEIMALRQGGLVMQNYRLFDATLYVTFEPCVMCAGAMINSRIGRVVFGVRNSKRGAAGSLMNVLNYPGMNHRVEITEGILADECAALLCDFYRMPRRVFNSQKKAQSSINSGGSSGGSSGSETPGTSESATPESSGGSSGGSDKKYSIGLAIGTNSVGWAVITDEYKVPSKKFKVLGNTDRHSIKKNLIGALLFDSGETAEATRLKRTARRRYTRRKNRICYLQEIFSNEMAKVDDSFFHRLEESFLVEEDKKHERHPIFGNIVDEVAYHEKYPTIYHLRKKLVDSTDKADLRLIYLALAHMIKFRGHFLIEGDLNPDNSDVDKLFIQLVQTYNQLFEENPINASGVDAKAILSARLSKSRRLENLIAQLPGEKKNGLFGNLIALSLGLTPNFKSNFDLAEDAKLQLSKDTYDDDLDNLLAQIGDQYADLFLAAKNLSDAILLSDILRVNTEITKAPLSASMIKRYDEHHQDLTLLKALVRQQLPEKYKEIFFDQSKNGYAGYIDGGASQEEFYKFIKPILEKMDGTEELLVKLNREDLLRKQRTFDNGSIPHQIHLGELHAILRRQEDFYPFLKDNREKIEKILTFRIPYYVGPLARGNSRFAWMTRKSEETITPWNFEEVVDKGASAQSFIERMTNFDKNLPNEKVLPKHSLLYEYFTVYNELTKVKYVTEGMRKPAFLSGEQKKAIVDLLFKTNRKVTVKQLKEDYFKKIECFDSVEISGVEDRFNASLGTYHDLLKIIKDKDFLDNEENEDILEDIVLTLTLFEDREMIEERLKTYAHLFDDKVMKQLKRRRYTGWGRLSRKLINGIRDKQSGKTILDFLKSDGFANRNFMQLIHDDSLTFKEDIQKAQVSGQGDSLHEHIANLAGSPAIKKGILQTVKVVDELVKVMGRHKPENIVIEMARENQTTQKGQKNSRERMKRIEEGIKELGSQILKEHPVENTQLQNEKLYLYYLQNGRDMYVDQELDINRLSDYDVDHIVPQSFLKDDSIDNKVLTRSDKNRGKSDNVPSEEVVKKMKNYWRQLLNAKLITQRKFDNLTKAERGGLSELDKAGFIKRQLVETRQITKHVAQILDSRMNTKYDENDKLIREVKVITLKSKLVSDFRKDFQFYKVREINNYHHAHDAYLNAVVGTALIKKYPKLESEFVYGDYKVYDVRKMIAKSEQEIGKATAKYFFYSNIMNFFKTEITLANGEIRKRPLIETNGETGEIVWDKGRDFATVRKVLSMPQVNIVKKTEVQTGGFSKESILPKRNSDKLIARKKDWDPKKYGGFDSPTVAYSVLVVAKVEKGKSKKLKSVKELLGITIMERSSFEKNPIDFLEAKGYKEVKKDLIIKLPKYSLFELENGRKRMLASAGELQKGNELALPSKYVNFLYLASHYEKLKGSPEDNEQKQLFVEQHKHYLDEIIEQISEFSKRVILADANLDKVLSAYNKHRDKPIREQAENIIHLFTLTNLGAPAAFKYFDTTIDRKRYTSTKEVLDATLIHQSITGLYETRIDLSQLGGDSGGSGGSGGSTNLSDIIEKETGKQLVIQESILMLPEEVEEVIGNKPESDILVHTAYDESTDENVMLLTSDAPEYKPWALVIQDSNGENKIKMLSGGSKRTADGSEFEPKKKRKV

SEQ ID NO: 537 - protein, 1699 aa, synthetic construct
MKRTADGSEFESPKKKRKVSSEVEFSHEYWMRHALTLAKRARDEGAGPVGAVLVLNNRVIGEGWNRAIGLHDPTAHAEIMALRQGGLVMQNYRLFDATLYVTFEPCVMCAGAMINSRIGRVVFGVRNSKRGAAGSLMNVLNYPGMNHRVEITEGILADECAALLCDFYRIPRQVFNSQKKAQSSINSGGSSGGSSGSETPGTSESATPESSGGSSGGSDKKYSIGLAIGTNSVGWAVITDEYKVPSKKFKVLGNTDRHSIKKNLIGALLFDSGETAEATRLKRTARRRYTRRKNRICYLQEIFSNEMAKVDDSFFHRLEESFLVEEDKKHERHPIFGNIVDEVAYHEKYPTIYHLRKKLVDSTDKADLRLIYLALAHMIKFRGHFLIEGDLNPDNSDVDKLFIQLVQTYNQLFEENPINASGVDAKAILSARLSKSRRLENLIAQLPGEKKNGLFGNLIALSLGLTPNFKSNFDLAEDAKLQLSKDTYDDDLDNLLAQIGDQYADLFLAAKNLSDAILLSDILRVNTEITKAPLSASMIKRYDEHHQDLTLLKALVRQQLPEKYKEIFFDQSKNGYAGYIDGGASQEEFYKFIKPILEKMDGTEELLVKLNREDLLRKQRTFDNGSIPHQIHLGELHAILRRQEDFYPFLKDNREKIEKILTFRIPYYVGPLARGNSRFAWMTRKSEETITPWNFEEVVDKGASAQSFIERMTNFDKNLPNEKVLPKHSLLYEYFTVYNELTKVKYVTEGMRKPAFLSGEQKKAIVDLLFKTNRKVTVKQLKEDYFKKIECFDSVEISGVEDRFNASLGTYHDLLKIIKDKDFLDNEENEDILEDIVLTLTLFEDREMIEERLKTYAHLFDDKVMKQLKRRRYTGWGRLSRKLINGIRDKQSGKTILDFLKSDGFANRNFMQLIHDDSLTFKEDIQKAQVSGQGDSLHEHIANLAGSPAIKKGILQTVKVVDELVKVMGRHKPENIVIEMARENQTTQKGQKNSRERMKRIEEGIKELGSQILKEHPVENTQLQNEKLYLYYLQNGRDMYVDQELDINRLSDYDVDHIVPQSFLKDDSIDNKVLTRSDKNRGKSDNVPSEEVVKKMKNYWRQLLNAKLITQRKFDNLTKAERGGLSELDKAGFIKRQLVETRQITKHVAQILDSRMNTKYDENDKLIREVKVITLKSKLVSDFRKDFQFYKVREINNYHHAHDAYLNAVVGTALIKKYPKLESEFVYGDYKVYDVRKMIAKSEQEIGKATAKYFFYSNIMNFFKTEITLANGEIRKRPLIETNGETGEIVWDKGRDFATVRKVLSMPQVNIVKKTEVQTGGFSKESILPKRNSDKLIARKKDWDPKKYGGFDSPTVAYSVLVVAKVEKGKSKKLKSVKELLGITIMERSSFEKNPIDFLEAKGYKEVKKDLIIKLPKYSLFELENGRKRMLASAGELQKGNELALPSKYVNFLYLASHYEKLKGSPEDNEQKQLFVEQHKHYLDEIIEQISEFSKRVILADANLDKVLSAYNKHRDKPIREQAENIIHLFTLTNLGAPAAFKYFDTTIDRKRYTSTKEVLDATLIHQSITGLYETRIDLSQLGGDSGGSGGSGGSTNLSDIIEKETGKQLVIQESILMLPEEVEEVIGNKPESDILVHTAYDESTDENVMLLTSDAPEYKPWALVIQDSNGENKIKMLSGGSKRTADGSEFEPKKKRKV

SEQ ID NO: 538 - protein, 1699 aa, synthetic construct
MKRTADGSEFESPKKKRKVSSEVEFSHEYWMRHALTLAKRARDERKAPVGAVLVLNNRVIGEGWNRAIGLHDPTAHAEIIALRQGGLVMQNYRLIDATLYVTFEPCVMCAGAMINSRIGRVVFGVRNSKRGAAGSLMNVLNYPGMNHRVEITEGILADECAALLCDFYRMPRQVFNAQKKAQSSINSGGSSGGSSGSETPGTSESATPESSGGSSGGSDKKYSIGLAIGTNSVGWAVITDEYKVPSKKFKVLGNTDRHSIKKNLIGALLFDSGETAEATRLKRTARRRYTRRKNRICYLQEIFSNEMAKVDDSFFHRLEESFLVEEDKKHERHPIFGNIVDEVAYHEKYPTIYHLRKKLVDSTDKADLRLIYLALAHMIKFRGHFLIEGDLNPDNSDVDKLFIQLVQTYNQLFEENPINASGVDAKAILSARLSKSRRLENLIAQLPGEKKNGLFGNLIALSLGLTPNFKSNFDLAEDAKLQLSKDTYDDDLDNLLAQIGDQYADLFLAAKNLSDAILLSDILRVNTEITKAPLSASMIKRYDEHHQDLTLLKALVRQQLPEKYKEIFFDQSKNGYAGYIDGGASQEEFYKFIKPILEKMDGTEELLVKLNREDLLRKQRTFDNGSIPHQIHLGELHAILRRQEDFYPFLKDNREKIEKILTFRIPYYVGPLARGNSRFAWMTRKSEETITPWNFEEVVDKGASAQSFIERMTNFDKNLPNEKVLPKHSLLYEYFTVYNELTKVKYVTEGMRKPAFLSGEQKKAIVDLLFKTNRKVTVKQLKEDYFKKIECFDSVEISGVEDRFNASLGTYHDLLKIIKDKDFLDNEENEDILEDIVLTLTLFEDREMIEERLKTYAHLFDDKVMKQLKRRRYTGWGRLSRKLINGIRDKQSGKTILDFLKSDGFANRNFMQLIHDDSLTFKEDIQKAQVSGQGDSLHEHIANLAGSPAIKKGILQTVKVVDELVKVMGRHKPENIVIEMARENQTTQKGQKNSRERMKRIEEGIKELGSQILKEHPVENTQLQNEKLYLYYLQNGRDMYVDQELDINRLSDYDVDHIVPQSFLKDDSIDNKVLTRSDKNRGKSDNVPSEEVVKKMKNYWRQLLNAKLITQRKFDNLTKAERGGLSELDKAGFIKRQLVETRQITKHVAQILDSRMNTKYDENDKLIREVKVITLKSKLVSDFRKDFQFYKVREINNYHHAHDAYLNAVVGTALIKKYPKLESEFVYGDYKVYDVRKMIAKSEQEIGKATAKYFFYSNIMNFFKTEITLANGEIRKRPLIETNGETGEIVWDKGRDFATVRKVLSMPQVNIVKKTEVQTGGFSKESILPKRNSDKLIARKKDWDPKKYGGFDSPTVAYSVLVVAKVEKGKSKKLKSVKELLGITIMERSSFEKNPIDFLEAKGYKEVKKDLIIKLPKYSLFELENGRKRMLASAGELQKGNELALPSKYVNFLYLASHYEKLKGSPEDNEQKQLFVEQHKHYLDEIIEQISEFSKRVILADANLDKVLSAYNKHRDKPIREQAENIIHLFTLTNLGAPAAFKYFDTTIDRKRYTSTKEVLDATLIHQSITGLYETRIDLSQLGGDSGGSGGSGGSTNLSDIIEKETGKQLVIQESILMLPEEVEEVIGNKPESDILVHTAYDESTDENVMLLTSDAPEYKPWALVIQDSNGENKIKMLSGGSKRTADGSEFEPKKKRKV

SEQ ID NO: 539 - protein, 1699 aa, synthetic construct
MKRTADGSEFESPKKKRKVSSEVEFSHEYWMRHALTLAKRARDERAGPVGAVLVLNNRVIGEGWNRAIGLHDPTAHAEIMALRQGGLVMQNHRLIDATLYVTFEPCVMCAGAMINSRIGRVVFGVRNSKRGAAGSLMNVLNYPGMNHRVEITEGILADECAALLCDFYRMPRHVFNSQKKAQSSINSGGSSGGSSGSETPGTSESATPESSGGSSGGSDKKYSIGLAIGTNSVGWAVITDEYKVPSKKFKVLGNTDRHSIKKNLIGALLFDSGETAEATRLKRTARRRYTRRKNRICYLQEIFSNEMAKVDDSFFHRLEESFLVEEDKKHERHPIFGNIVDEVAYHEKYPTIYHLRKKLVDSTDKADLRLIYLALAHMIKFRGHFLIEGDLNPDNSDVDKLFIQLVQTYNQLFEENPINASGVDAKAILSARLSKSRRLENLIAQLPGEKKNGLFGNLIALSLGLTPNFKSNFDLAEDAKLQLSKDTYDDDLDNLLAQIGDQYADLFLAAKNLSDAILLSDILRVNTEITKAPLSASMIKRYDEHHQDLTLLKALVRQQLPEKYKEIFFDQSKNGYAGYIDGGASQEEFYKFIKPILEKMDGTEELLVKLNREDLLRKQRTFDNGSIPHQIHLGELHAILRRQEDFYPFLKDNREKIEKILTFRIPYYVGPLARGNSRFAWMTRKSEETITPWNFEEVVDKGASAQSFIERMTNFDKNLPNEKVLPKHSLLYEYFTVYNELTKVKYVTEGMRKPAFLSGEQKKAIVDLLFKTNRKVTVKQLKEDYFKKIECFDSVEISGVEDRFNASLGTYHDLLKIIKDKDFLDNEENEDILEDIVLTLTLFEDREMIEERLKTYAHLFDDKVMKQLKRRRYTGWGRLSRKLINGIRDKQSGKTILDFLKSDGFANRNFMQLIHDDSLTFKEDIQKAQVSGQGDSLHEHIANLAGSPAIKKGILQTVKVVDELVKVMGRHKPENIVIEMARENQTTQKGQKNSRERMKRIEEGIKELGSQILKEHPVENTQLQNEKLYLYYLQNGRDMYVDQELDINRLSDYDVDHIVPQSFLKDDSIDNKVLTRSDKNRGKSDNVPSEEVVKKMKNYWRQLLNAKLITQRKFDNLTKAERGGLSELDKAGFIKRQLVETRQITKHVAQILDSRMNTKYDENDKLIREVKVITLKSKLVSDFRKDFQFYKVREINNYHHAHDAYLNAVVGTALIKKYPKLESEFVYGDYKVYDVRKMIAKSEQEIGKATAKYFFYSNIMNFFKTEITLANGEIRKRPLIETNGETGEIVWDKGRDFATVRKVLSMPQVNIVKKTEVQTGGFSKESILPKRNSDKLIARKKDWDPKKYGGFDSPTVAYSVLVVAKVEKGKSKKLKSVKELLGITIMERSSFEKNPIDFLEAKGYKEVKKDLIIKLPKYSLFELENGRKRMLASAGELQKGNELALPSKYVNFLYLASHYEKLKGSPEDNEQKQLFVEQHKHYLDEIIEQISEFSKRVILADANLDKVLSAYNKHRDKPIREQAENIIHLFTLTNLGAPAAFKYFDTTIDRKRYTSTKEVLDATLIHQSITGLYETRIDLSQLGGDSGGSGGSGGSTNLSDIIEKETGKQLVIQESILMLPEEVEEVIGNKPESDILVHTAYDESTDENVMLLTSDAPEYKPWALVIQDSNGENKIKMLSGGSKRTADGSEFEPKKKRKV

SEQ ID NO: 540 - protein, 1699 aa, synthetic construct
MKRTADGSEFESPKKKRKVSSEVEFSHEYWMRHALTLAKRARDEGAGPVGAVLVLNNRVIGEGWNRAIGLHDPTAHAEIMALRQGGLVMQNYRLFDATLYVTFEPCVMCAGAMINSRIGRVVFGWRNSKRGAAGSLMNVLNYPGMNHRVEITEGILADECAALLCDFYRMPRQVFNSQKKAQSSINSGGSSGGSSGSETPGTSESATPESSGGSSGGSDKKYSIGLAIGTNSVGWAVITDEYKVPSKKFKVLGNTDRHSIKKNLIGALLFDSGETAEATRLKRTARRRYTRRKNRICYLQEIFSNEMAKVDDSFFHRLEESFLVEEDKKHERHPIFGNIVDEVAYHEKYPTIYHLRKKLVDSTDKADLRLIYLALAHMIKFRGHFLIEGDLNPDNSDVDKLFIQLVQTYNQLFEENPINASGVDAKAILSARLSKSRRLENLIAQLPGEKKNGLFGNLIALSLGLTPNFKSNFDLAEDAKLQLSKDTYDDDLDNLLAQIGDQYADLFLAAKNLSDAILLSDILRVNTEITKAPLSASMIKRYDEHHQDLTLLKALVRQQLPEKYKEIFFDQSKNGYAGYIDGGASQEEFYKFIKPILEKMDGTEELLVKLNREDLLRKQRTFDNGSIPHQIHLGELHAILRRQEDFYPFLKDNREKIEKILTFRIPYYVGPLARGNSRFAWMTRKSEETITPWNFEEVVDKGASAQSFIERMTNFDKNLPNEKVLPKHSLLYEYFTVYNELTKVKYVTEGMRKPAFLSGEQKKAIVDLLFKTNRKVTVKQLKEDYFKKIECFDSVEISGVEDRFNASLGTYHDLLKIIKDKDFLDNEENEDILEDIVLTLTLFEDREMIEERLKTYAHLFDDKVMKQLKRRRYTGWGRLSRKLINGIRDKQSGKTILDFLKSDGFANRNFMQLIHDDSLTFKEDIQKAQVSGQGDSLHEHIANLAGSPAIKKGILQTVKVVDELVKVMGRHKPENIVIEMARENQTTQKGQKNSRERMKRIEEGIKELGSQILKEHPVENTQLQNEKLYLYYLQNGRDMYVDQELDINRLSDYDVDHIVPQSFLKDDSIDNKVLTRSDKNRGKSDNVPSEEVVKKMKNYWRQLLNAKLITQRKFDNLTKAERGGLSELDKAGFIKRQLVETRQITKHVAQILDSRMNTKYDENDKLIREVKVITLKSKLVSDFRKDFQFYKVREINNYHHAHDAYLNAVVGTALIKKYPKLESEFVYGDYKVYDVRKMIAKSEQEIGKATAKYFFYSNIMNFFKTEITLANGEIRKRPLIETNGETGEIVWDKGRDFATVRKVLSMPQVNIVKKTEVQTGGFSKESILPKRNSDKLIARKKDWDPKKYGGFDSPTVAYSVLVVAKVEKGKSKKLKSVKELLGITIMERSSFEKNPIDFLEAKGYKEVKKDLIIKLPKYSLFELENGRKRMLASAGELQKGNELALPSKYVNFLYLASHYEKLKGSPEDNEQKQLFVEQHKHYLDEIIEQISEFSKRVILADANLDKVLSAYNKHRDKPIREQAENIIHLFTLTNLGAPAAFKYFDTTIDRKRYTSTKEVLDATLIHQSITGLYETRIDLSQLGGDSGGSGGSGGSTNLSDIIEKETGKQLVIQESILMLPEEVEEVIGNKPESDILVHTAYDESTDENVMLLTSDAPEYKPWALVIQDSNGENKIKMLSGGSKRTADGSEFEPKKKRKV

SEQ ID NO: 541 - protein, 1699 aa, synthetic construct
MKRTADGSEFESPKKKRKVSSEVEFSHEYWMRHALTLAKRARDERKAPVGAVLVLNNRVIGEGWNRAIGLHDPTAHAEIIALRQGGLVMQNYRLIDATLYVTFEPCVMCAGAMINSRIGRVVFGWRNSKRGAAGSLMNVLNYPGMNHRVEITEGILADECAALLCDFYRMPRQVFNAQKKAQSSINSGGSSGGSSGSETPGTSESATPESSGGSSGGSDKKYSIGLAIGTNSVGWAVITDEYKVPSKKFKVLGNTDRHSIKKNLIGALLFDSGETAEATRLKRTARRRYTRRKNRICYLQEIFSNEMAKVDDSFFHRLEESFLVEEDKKHERHPIFGNIVDEVAYHEKYPTIYHLRKKLVDSTDKADLRLIYLALAHMIKFRGHFLIEGDLNPDNSDVDKLFIQLVQTYNQLFEENPINASGVDAKAILSARLSKSRRLENLIAQLPGEKKNGLFGNLIALSLGLTPNFKSNFDLAEDAKLQLSKDTYDDDLDNLLAQIGDQYADLFLAAKNLSDAILLSDILRVNTEITKAPLSASMIKRYDEHHQDLTLLKALVRQQLPEKYKEIFFDQSKNGYAGYIDGGASQEEFYKFIKPILEKMDGTEELLVKLNREDLLRKQRTFDNGSIPHQIHLGELHAILRRQEDFYPFLKDNREKIEKILTFRIPYYVGPLARGNSRFAWMTRKSEETITPWNFEEVVDKGASAQSFIERMTNFDKNLPNEKVLPKHSLLYEYFTVYNELTKVKYVTEGMRKPAFLSGEQKKAIVDLLFKTNRKVTVKQLKEDYFKKIECFDSVEISGVEDRFNASLGTYHDLLKIIKDKDFLDNEENEDILEDIVLTLTLFEDREMIEERLKTYAHLFDDKVMKQLKRRRYTGWGRLSRKLINGIRDKQSGKTILDFLKSDGFANRNFMQLIHDDSLTFKEDIQKAQVSGQGDSLHEHIANLAGSPAIKKGILQTVKVVDELVKVMGRHKPENIVIEMARENQTTQKGQKNSRERMKRIEEGIKELGSQILKEHPVENTQLQNEKLYLYYLQNGRDMYVDQELDINRLSDYDVDHIVPQSFLKDDSIDNKVLTRSDKNRGKSDNVPSEEVVKKMKNYWRQLLNAKLITQRKFDNLTKAERGGLSELDKAGFIKRQLVETRQITKHVAQILDSRMNTKYDENDKLIREVKVITLKSKLVSDFRKDFQFYKVREINNYHHAHDAYLNAVVGTALIKKYPKLESEFVYGDYKVYDVRKMIAKSEQEIGKATAKYFFYSNIMNFFKTEITLANGEIRKRPLIETNGETGEIVWDKGRDFATVRKVLSMPQVNIVKKTEVQTGGFSKESILPKRNSDKLIARKKDWDPKKYGGFDSPTVAYSVLVVAKVEKGKSKKLKSVKELLGITIMERSSFEKNPIDFLEAKGYKEVKKDLIIKLPKYSLFELENGRKRMLASAGELQKGNELALPSKYVNFLYLASHYEKLKGSPEDNEQKQLFVEQHKHYLDEIIEQISEFSKRVILADANLDKVLSAYNKHRDKPIREQAENIIHLFTLTNLGAPAAFKYFDTTIDRKRYTSTKEVLDATLIHQSITGLYETRIDLSQLGGDSGGSGGSGGSTNLSDIIEKETGKQLVIQESILMLPEEVEEVIGNKPESDILVHTAYDESTDENVMLLTSDAPEYKPWALVIQDSNGENKIKMLSGGSKRTADGSEFEPKKKRKV

SEQ ID NO: 542 - protein, 1699 aa, synthetic construct
MKRTADGSEFESPKKKRKVSSEVEFSHEYWMRHALTLAKRARDEGEAPVGAVLVLNNRVIGEGWNRRIGLHDPTAHAEIMALRQGGLVMQNSRLIDATLYVTFEPCVMCAGAMINSRIGRVVFGVRNSKRGAAGSLMNVLNYPGMNHRVEITEGILADECAALLCDFYRMPRQVFNAQKKAQSSINSGGSSGGSSGSETPGTSESATPESSGGSSGGSDKKYSIGLAIGTNSVGWAVITDEYKVPSKKFKVLGNTDRHSIKKNLIGALLFDSGETAEATRLKRTARRRYTRRKNRICYLQEIFSNEMAKVDDSFFHRLEESFLVEEDKKHERHPIFGNIVDEVAYHEKYPTIYHLRKKLVDSTDKADLRLIYLALAHMIKFRGHFLIEGDLNPDNSDVDKLFIQLVQTYNQLFEENPINASGVDAKAILSARLSKSRRLENLIAQLPGEKKNGLFGNLIALSLGLTPNFKSNFDLAEDAKLQLSKDTYDDDLDNLLAQIGDQYADLFLAAKNLSDAILLSDILRVNTEITKAPLSASMIKRYDEHHQDLTLLKALVRQQLPEKYKEIFFDQSKNGYAGYIDGGASQEEFYKFIKPILEKMDGTEELLVKLNREDLLRKQRTFDNGSIPHQIHLGELHAILRRQEDFYPFLKDNREKIEKILTFRIPYYVGPLARGNSRFAWMTRKSEETITPWNFEEVVDKGASAQSFIERMTNFDKNLPNEKVLPKHSLLYEYFTVYNELTKVKYVTEGMRKPAFLSGEQKKAIVDLLFKTNRKVTVKQLKEDYFKKIECFDSVEISGVEDRFNASLGTYHDLLKIIKDKDFLDNEENEDILEDIVLTLTLFEDREMIEERLKTYAHLFDDKVMKQLKRRRYTGWGRLSRKLINGIRDKQSGKTILDFLKSDGFANRNFMQLIHDDSLTFKEDIQKAQVSGQGDSLHEHIANLAGSPAIKKGILQTVKVVDELVKVMGRHKPENIVIEMARENQTTQKGQKNSRERMKRIEEGIKELGSQILKEHPVENTQLQNEKLYLYYLQNGRDMYVDQELDINRLSDYDVDHIVPQSFLKDDSIDNKVLTRSDKNRGKSDNVPSEEVVKKMKNYWRQLLNAKLITQRKFDNLTKAERGGLSELDKAGFIKRQLVETRQITKHVAQILDSRMNTKYDENDKLIREVKVITLKSKLVSDFRKDFQFYKVREINNYHHAHDAYLNAVVGTALIKKYPKLESEFVYGDYKVYDVRKMIAKSEQEIGKATAKYFFYSNIMNFFKTEITLANGEIRKRPLIETNGETGEIVWDKGRDFATVRKVLSMPQVNIVKKTEVQTGGFSKESILPKRNSDKLIARKKDWDPKKYGGFDSPTVAYSVLVVAKVEKGKSKKLKSVKELLGITIMERSSFEKNPIDFLEAKGYKEVKKDLIIKLPKYSLFELENGRKRMLASAGELQKGNELALPSKYVNFLYLASHYEKLKGSPEDNEQKQLFVEQHKHYLDEIIEQISEFSKRVILADANLDKVLSAYNKHRDKPIREQAENIIHLFTLTNLGAPAAFKYFDTTIDRKRYTSTKEVLDATLIHQSITGLYETRIDLSQLGGDSGGSGGSGGSTNLSDIIEKETGKQLVIQESILMLPEEVEEVIGNKPESDILVHTAYDESTDENVMLLTSDAPEYKPWALVIQDSNGENKIKMLSGGSKRTADGSEFEPKKKRKV

SEQ ID NO: 543 - protein, 1699 aa, synthetic construct
MKRTADGSEFESPKKKRKVSSEVEFSHEYWMRHALTLAKRARDEGEGPVGAVLVLNNRVIGEGWNRRIGLHDPTAHAEIMALRQGGLVMQNCKLIDATLYVTFEPCVMCAGAMIHSRIGRVVFGVRNSKRGAAGSLMNVLNYPGMNHRVEITEGILADECAALLCDFYRMPRQVFNAQKKAQSSINSGGSSGGSSGSETPGTSESATPESSGGSSGGSDKKYSIGLAIGTNSVGWAVITDEYKVPSKKFKVLGNTDRHSIKKNLIGALLFDSGETAEATRLKRTARRRYTRRKNRICYLQEIFSNEMAKVDDSFFHRLEESFLVEEDKKHERHPIFGNIVDEVAYHEKYPTIYHLRKKLVDSTDKADLRLIYLALAHMIKFRGHFLIEGDLNPDNSDVDKLFIQLVQTYNQLFEENPINASGVDAKAILSARLSKSRRLENLIAQLPGEKKNGLFGNLIALSLGLTPNFKSNFDLAEDAKLQLSKDTYDDDLDNLLAQIGDQYADLFLAAKNLSDAILLSDILRVNTEITKAPLSASMIKRYDEHHQDLTLLKALVRQQLPEKYKEIFFDQSKNGYAGYIDGGASQEEFYKFIKPILEKMDGTEELLVKLNREDLLRKQRTFDNGSIPHQIHLGELHAILRRQEDFYPFLKDNREKIEKILTFRIPYYVGPLARGNSRFAWMTRKSEETITPWNFEEVVDKGASAQSFIERMTNFDKNLPNEKVLPKHSLLYEYFTVYNELTKVKYVTEGMRKPAFLSGEQKKAIVDLLFKTNRKVTVKQLKEDYFKKIECFDSVEISGVEDRFNASLGTYHDLLKIIKDKDFLDNEENEDILEDIVLTLTLFEDREMIEERLKTYAHLFDDKVMKQLKRRRYTGWGRLSRKLINGIRDKQSGKTILDFLKSDGFANRNFMQLIHDDSLTFKEDIQKAQVSGQGDSLHEHIANLAGSPAIKKGILQTVKVVDELVKVMGRHKPENIVIEMARENQTTQKGQKNSRERMKRIEEGIKELGSQILKEHPVENTQLQNEKLYLYYLQNGRDMYVDQELDINRLSDYDVDHIVPQSFLKDDSIDNKVLTRSDKNRGKSDNVPSEEVVKKMKNYWRQLLNAKLITQRKFDNLTKAERGGLSELDKAGFIKRQLVETRQITKHVAQILDSRMNTKYDENDKLIREVKVITLKSKLVSDFRKDFQFYKVREINNYHHAHDAYLNAVVGTALIKKYPKLESEFVYGDYKVYDVRKMIAKSEQEIGKATAKYFFYSNIMNFFKTEITLANGEIRKRPLIETNGETGEIVWDKGRDFATVRKVLSMPQVNIVKKTEVQTGGFSKESILPKRNSDKLIARKKDWDPKKYGGFDSPTVAYSVLVVAKVEKGKSKKLKSVKELLGITIMERSSFEKNPIDFLEAKGYKEVKKDLIIKLPKYSLFELENGRKRMLASAGELQKGNELALPSKYVNFLYLASHYEKLKGSPEDNEQKQLFVEQHKHYLDEIIEQISEFSKRVILADANLDKVLSAYNKHRDKPIREQAENIIHLFTLTNLGAPAAFKYFDTTIDRKRYTSTKEVLDATLIHQSITGLYETRIDLSQLGGDSGGSGGSGGSTNLSDIIEKETGKQLVIQESILMLPEEVEEVIGNKPESDILVHTAYDESTDENVMLLTSDAPEYKPWALVIQDSNGENKIKMLSGGSKRTADGSEFEPKKKRKV

SEQ ID NO: 544 - protein, 1505 aa, synthetic construct
MKRTADGSEFESPKKKRKVSSEVEFSHEYWMRHALTLAKRARDEGAGPVGAVLVLNNRVIGEGWNRAIGLHDPTAHAEIMALRQGGLVMQNYRLFDATLYVTFEPCVMCAGAMINSRIGRVVFGVRNSKRGAAGSLMNVLNYPGMNHRVEITEGILADECAALLCDFYRMPRQVFNSQKKAQSSINSGGSSGGSSGSETPGTSESATPESSGGSSGGSAAFKPNPINYILGLAIGIASVGWAMVEIDEEGNPIRLIDLGVRVFERAEVPKTGDSLAMARRLARSVRRLTRRRAHRLLRARRLLKREGVLQAADFDENGLITSLPNTPWQLRAAALDRKLTPLEWSAVLLHLIKHRGYLSQRKNEGETAAKELGALLKGVANNAHALQTGDFRTPAELALNKFEKESGHIRNQRGDYSHTFSRKDLQAELILLFEKQKEFGNPHVSGGLKEGIETLLMTQRPALSGDAVQKMLGHCTLEPTEPKAAKNTYTAERFIWLTKLNNLRILEQGSERPLTDTERSTLMDEPYRKSKLTYAQARKLLGLEDTAFFKGLRYGKDNAEASTLMEMKAYHAISRALEKEGLKDKKSPLNLSSELQDEIGTAFSLFKTDEDITGRLKDRVQPEILEALLKHISFDKFVQISLKALRRIVPLMEQGKRYDEACAEIYGVHYGKKNTEEKIYLPPIPADEIRNPVVLRALSQARKVINGVVRRYGSPARIHIETAREVGKSFKDRKEIAKRQEENRKDREKAAAKFREYFPNFVGEPKSKDILKLRLYEQQHGKCLYSGKEINLVRLNEKGYVEIDHALPFSRTWDDSFNNKVLVLGSENQNKGNQTPYEYFNGKDNSREWQEFKARVETSRFPSSKKQRILLQKFDEDGFKECNLNDTRYVNRFLCQFVADHILLTGKGKRRVVASNGQITNLLRGFWRLRKVRAENDRHHALDAVVVACSTVAMQQKITRFVRYKEMNAFDGKTVDKETGKVLYQKTHFPQPWEFFAQEVMIRVFGKPDGKPEFEEADTPEKLRTLLAEKLSSRPEAVHEYVTPLFVSRAPNRKMSGAHKDTLRSAKRFVKHNEKISVKRVWLTEIKLADLENMVNYKNGREIELYEALKARLEAYGGNAKQAFDPKDNPFYKKGGQLVKAVRVEKTQKSGVLLNKKNAYTIADNGDMVRVDVFCKVDKKGKNQYFIVPIYAWQVAENILPDIDCKGYRIDDSYTFCFSLHKYDLIAFQKDEKSKVEFAYYINCDSSSGGFYLAWHDKGSREQRFRISTQNLALIQKYQVNELGKEIRPCRLKKRPPVSGGSGGSGGSTNLSDIIEKETGKQLVIQESILMLPEEVEEVIGNKPESDILVHTAYDESTDENVMLLTSDAPEYKPWALVIQDSNGENKIKMLSGGSGGSGGSTNLSDIIEKETGKQLVIQESILMLPEEVEEVIGNKPESDILVHTAYDESTDENVMLLTSDAPEYKPWALVIQDSNGENKIKMLSGGSKRTADGSEFEPKKKRKV

SEQ ID NO: 545 - protein, 1478 aa, synthetic construct
MKRTADGSEFESPKKKRKVSSEVEFSHEYWMRHALTLAKRARDEGAGPVGAVLVLNNRVIGEGWNRAIGLHDPTAHAEIMALRQGGLVMQNYRLFDATLYVTFEPCVMCAGAMINSRIGRVVFGVRNSKRGAAGSLMNVLNYPGMNHRVEITEGILADECAALLCDFYRMPRQVFNSQKKAQSSINSGGSSGGSSGSETPGTSESATPESSGGSSGGSGKRNYILGLAIGITSVGYGIIDYETRDVIDAGVRLFKEANVENNEGRRSKRGARRLKRRRRHRIQRVKKLLFDYNLLTDHSELSGINPYEARVKGLSQKLSEEEFSAALLHLAKRRGVHNVNEVEEDTGNELSTKEQISRNSKALEEKYVAELQLERLKKDGEVRGSINRFKTSDYVKEAKQLLKVQKAYHQLDQSFIDTYIDLLETRRTYYEGPGEGSPFGWKDIKEWYEMLMGHCTYFPEELRSVKYAYNADLYNALNDLNNLVITRDENEKLEYYEKFQIIENVFKQKKKPTLKQIAKEILVNEEDIKGYRVTSTGKPEFTNLKVYHDIKDITARKEIIENAELLDQIAKILTIYQSSEDIQEELTNLNSELTQEEIEQISNLKGYTGTHNLSLKAINLILDELWHTNDNQIAIFNRLKLVPKKVDLSQQKEIPTTLVDDFILSPVVKRSFIQSIKVINAIIKKYGLPNDIIIELAREKNSKDAQKMINEMQKRNRQTNERIEEIIRTTGKENAKYLIEKIKLHDMQEGKCLYSLEAIPLEDLLNNPFNYEVDHIIPRSVSFDNSFNNKVLVKQEENSKKGNRTPFQYLSSSDSKISYETFKKHILNLAKGKGRISKTKKEYLLEERDINRFSVQKDFINRNLVDTRYATRGLMNLLRSYFRVNNLDVKVKSINGGFTSFLRRKWKFKKERNKGYKHHAEDALIIANADFIFKEWKKLDKAKKVMENQMFEEKQAESMPEIETEQEYKEIFITPHQIKHIKDFKDYKYSHRVDKKPNRELINDTLYSTRKDDKGNTLIVNNLNGLYDKDNDKLKKLINKSPEKLLMYHHDPQTYQKLKLIMEQYGDEKNPLYKYYEETGNYLTKYSKKDNGPVIKKIKYYGNKLNAHLDITDDYPNSRNKVVKLSLKPYRFDVYLDNGVYKFVTVKNLDVIKKENYYEVNSKCYEEAKKLKKISNQAEFIASFYNNDLIKINGELYRVIGVNNDLLNRIEVNMIDITYREYLENMNDKRPPRIIKTIASKTQSIKKYSTDILGNLYEVKSKKHPQIIKKGSGGSGGSGGSTNLSDIIEKETGKQLVIQESILMLPEEVEEVIGNKPESDILVHTAYDESTDENVMLLTSDAPEYKPWALVIQDSNGENKIKMLSGGSGGSGGSTNLSDIIEKETGKQLVIQESILMLPEEVEEVIGNKPESDILVHTAYDESTDENVMLLTSDAPEYKPWALVIQDSNGENKIKMLSGGSKRTADGSEFEPKKKRKV

SEQ ID NO: 546 - protein, 1792 aa, synthetic construct
MKRTADGSEFESPKKKRKVSSEVEFSHEYWMRHALTLAKRARDEGAGPVGAVLVLNNRVIGEGWNRAIGLHDPTAHAEIMALRQGGLVMQNYRLFDATLYVTFEPCVMCAGAMINSRIGRVVFGVRNSKRGAAGSLMNVLNYPGMNHRVEITEGILADECAALLCDFYRMPRQVFNSQKKAQSSINSGGSSGGSSGSETPGTSESATPESSGGSSGGSDKKYSIGLAIGTNSVGWAVITDEYKVPSKKFKVLGNTDRHSIKKNLIGALLFDSGETAEATRLKRTARRRYTRRKNRICYLQEIFSNEMAKVDDSFFHRLEESFLVEEDKKHERHPIFGNIVDEVAYHEKYPTIYHLRKKLVDSTDKADLRLIYLALAHMIKFRGHFLIEGDLNPDNSDVDKLFIQLVQTYNQLFEENPINASGVDAKAILSARLSKSRRLENLIAQLPGEKKNGLFGNLIALSLGLTPNFKSNFDLAEDAKLQLSKDTYDDDLDNLLAQIGDQYADLFLAAKNLSDAILLSDILRVNTEITKAPLSASMIKRYDEHHQDLTLLKALVRQQLPEKYKEIFFDQSKNGYAGYIDGGASQEEFYKFIKPILEKMDGTEELLVKLNREDLLRKQRTFDNGSIPHQIHLGELHAILRRQEDFYPFLKDNREKIEKILTFRIPYYVGPLARGNSRFAWMTRKSEETITPWNFEEVVDKGASAQSFIERMTNFDKNLPNEKVLPKHSLLYEYFTVYNELTKVKYVTEGMRKPAFLSGEQKKAIVDLLFKTNRKVTVKQLKEDYFKKIECFDSVEISGVEDRFNASLGTYHDLLKIIKDKDFLDNEENEDILEDIVLTLTLFEDREMIEERLKTYAHLFDDKVMKQLKRRRYTGWGRLSRKLINGIRDKQSGKTILDFLKSDGFANRNFMQLIHDDSLTFKEDIQKAQVSGQGDSLHEHIANLAGSPAIKKGILQTVKVVDELVKVMGRHKPENIVIEMARENQTTQKGQKNSRERMKRIEEGIKELGSQILKEHPVENTQLQNEKLYLYYLQNGRDMYVDQELDINRLSDYDVDHIVPQSFLKDDSIDNKVLTRSDKNRGKSDNVPSEEVVKKMKNYWRQLLNAKLITQRKFDNLTKAERGGLSELDKAGFIKRQLVETRQITKHVAQILDSRMNTKYDENDKLIREVKVITLKSKLVSDFRKDFQFYKVREINNYHHAHDAYLNAVVGTALIKKYPKLESEFVYGDYKVYDVRKMIAKSEQEIGKATAKYFFYSNIMNFFKTEITLANGEIRKRPLIETNGETGEIVWDKGRDFATVRKVLSMPQVNIVKKTEVQTGGFSKESIRPKRNSDKLIARKKDWDPKKYGGFVSPTVAYSVLVVAKVEKGKSKKLKSVKELLGITIMERSSFEKNPIDFLEAKGYKEVKKDLIIKLPKYSLFELENGRKRMLASARFLQKGNELALPSKYVNFLYLASHYEKLKGSPEDNEQKQLFVEQHKHYLDEIIEQISEFSKRVILADANLDKVLSAYNKHRDKPIREQAENIIHLFTLTNLGAPRAFKYFDTTIDRKVYRSTKEVLDATLIHQSITGLYETRIDLSQLGGDSGGSGGSGGSTNLSDIIEKETGKQLVIQESILMLPEEVEEVIGNKPESDILVHTAYDESTDENVMLLTSDAPEYKPWALVIQDSNGENKIKMLSGGSGGSGGSTNLSDIIEKETGKQLVIQESILMLPEEVEEVIGNKPESDILVHTAYDESTDENVMLLTSDAPEYKPWALVIQDSNGENKIKMLSGGSKRTADGSEFEPKKKRKV

SEQ ID NO: 547 - protein, 1315 aa, synthetic construct
MKRTADGSEFESPKKKRKVSSEVEFSHEYWMRHALTLAKRARDEGAGPVGAVLVLNNRVIGEGWNRAIGLHDPTAHAEIMALRQGGLVMQNYRLFDATLYVTFEPCVMCAGAMINSRIGRVVFGVRNSKRGAAGSLMNVLNYPGMNHRVEITEGILADECAALLCDFYRMPRQVFNSQKKAQSSINSGGSSGGSSGSETPGTSESATPESSGGSSGGSARILAFAIGISSIGWAFSENDELKDCGVRIFTKVENPKTGESLALPRRLARSARKRYARRKARLNHLKHLIANEFKLNYEDYQSFDESLAKAYKGSLISPYELRFRALNELLSKQDFARVILHIAKRRGYDDIKNSDDKEKGAILKAIKQNEEKLANYQSVGEYLYKEYFQKFKENSKEFTNVRNKKESYERCIAQSFLKDELKLIFKKQREFGFSFSKKFEEEVLSVAFYKRALKDFSHLVGNCSFFTDEKRAPKNSPLAFMFVALTRIINLLNNLKNTEGILYTKDDLNALLNEVLKNGTLTYKQTKKLLGLSDDYEFKGEKGTYFIEFKKYKEFIKALGEHNLSQDDLNEIAKDITLIKDEIKLKKALAKYDLNQNQIDSLSKLEFKDHLNISFKALKLVTPLMLEGKKYDEACNELNLKVAINEDKKDFLPAFNETYYKDEVTNPVVLRAIKEYRKVLNALLKKYGKVHKINIELAREVGKNHSQRAKIEKEQNENYKAKKDAELECEKLGLKINSKNILKLRLFKEQKEFCAYSGEKIKISDLQDEKMLEIDHIYPYSRSFDDSYMNKVLVFTKQNQEKLNQTPFEAFGNDSAKWQKIEVLAKNLPTKKQKRILDKNYKDKEQKNFKDRNLNDTRYIARLVLNYTKDYLDFLPLSDDENTKLNDTQKGSKVHVEAKSGMLTSALRHTWGFSAKDRNNHLHHAIDAVIIAYANNSIVKAFSDFKKEQESNSAELYAKKISELDYKNKRKFFEPFSGFRQKVLDKIDEIFVSKPERKKPSGALHEETFRKEEEFYQSYGGKEGVLKALELGKIRKVNGKIVKNGDMFRVDIFKHKKTNKFYAVPIYTMDFALKVLPNKAVARSKKGEIKDWILMDENYEFCFSLYKDSLILIQTKKMQEPEFVYYNAFTSSTVSLIVSKHDNKFETLSKNQKILFKNANEKEVIAKSIGIQNLKVFEKYIVSALGEVTKAEFRQREDFKKSGGSGGSGGSTNLSDIIEKETGKQLVIQESILMLPEEVEEVIGNKPESDILVHTAYDESTDENVMLLTSDAPEYKPWALVIQDSNGENKIKMLSGGSKRTADGSEFEPKKKRKV

SEQ ID NO: 548 - DNA, 7917 bp, synthetic construct
  source 1..7917: mol_type = other DNA
tagttattaatagtaatcaattacggggtcattagttcatagcccatatatggagttccgcgttacataacttacggtaaatggcccgcctggctgaccgcccaacgacccccgcccattgacgtcaataatgacgtatgttcccatagtaacgccaatagggactttccattgacgtcaatgggtggagtatttacggtaaactgcccacttggcagtacatcaagtgtatcatatgccaagtacgccccctattgacgtcaatgacggtaaatggcccgcctggcattatgcccagtacatgaccttatgggactttcctacttggcagtacatctacgtattagtcatcgctattaccatggtgatgcggttttggcagtacatcaatgggcgtggatagcggtttgactcacggggatttccaagtctccaccccattgacgtcaatgggagtttgttttggcaccaaaatcaacgggactttccaaaatgtcgtaacaactccgccccattgacgcaaatgggcggtaggcgtgtacggtgggaggtctatataagcagagctggtttagtgaaccgtcagatccgctagagatccgcggccgctaatacgactcactatagggagagccgccaccatgaaacggacagccgacggaagcgagttcgagtcaccaaagaagaagcggaaagtcagttctgaggtggagttttcccacgagtactggatgagacatgccctgaccctggccaagagggcacgggatgagggggcgggtcctgtgggagccgtgctggtgctgaacaatagagtgatcggcgagggctggaacagagccatcggcctgcacgacccaacagcccatgccgaaattatggccctgagacagggcggcctggtcatgcagaactacagactgtttgacgccaccctgtacgtgacattcgagccttgcgtgatgtgcgccggcgccatgatcaactctaggatcggccgcgtggtgtttggcgtgaggaactcaaaaagaggcgccgcaggctccctgatgaacgtgctgaactaccccggcatgaatcaccgcgtcgaaattaccgagggaatcctggcagatgaatgtgccgccctgctgtgcgatttctatcggatgcctagacaggtgttcaattctcagaagaaggcccagagctccatcaactctggcggatctagcggaggatcctctggcagcgagacaccaggaacaagcgagtcagcaacaccagagagcagtggcggcagcagcggcggcagcgcagcattcaagcctaacccaatcaattacatcctgggactggcaatcggaatcgcatccgtgggatgggctatggtggagatcgacgaggaggggaatcctatccggctgatcgatctgggcgtgagagtgtttgagagggccgaggtgccaaagaccggcgattctctggctatggcccggagactggcacggagcgtgaggcgcctgacacggagaagggcacacaggctgctgagggcacgccggctgctgaagagagagggcgtgctgcaggcagcagacttcgatgagaatggcctgatcacgagcttgccaaacaccccctggcagctgagagcagccgccctggacaggaagctgacaccactggagtggtctgccgtgctgctgcacctgatcaagcaccgcggctacctgagccagcggaagaacgagggagagacagcagccaaggagctgggcgccctgctgaagggagtggccaacaatgcccacgccctgcagaccggcgatttcaggacacctgccgagctggccctgaataagtttgagaaggagtccggccacatcagaaaccagaggggcgactatagccacaccttctcccgcaaggatctgcaggccgagctgatcctgctgttcgagaagcagaaggagtttggcaatccacacgtgagcggaggcctgaaggagggaatcgagaccctgctgatgacacagaggcctgccctgtccggcgacgcagtgcagaagatgctggggcactgcaccctcgagcctacagagccaaaggccgccaagaacacctacacagccgagcggtttatctggctgacaaagctgaacaatctgagaatcctggagcagggatccgagaggccactgaccgacacagagaggtccaccctgatggatgagccttaccggaagtctaaactgacatatgcccaggccagaaagctgctgggcctggaggacaccgccttctttaagggcctgagatacggcaaggataatgccgaggcctccacactgatggagatgaaggcctatcacgccatctctcgcgccctggagaaggagggcctgaaggacaagaagtcccccctgaacctgagctccgagctgcaggatgagatcggcaccgccttctctctgtttaagaccgacgaggatatcacaggccgcctgaaggacagggtgcagcctgagatcctggaggccctgctgaagcacatctctttcgataagtttgtgcagatcagcctgaaggccctgagaaggatcgtgccactgatggagcagggcaagcggtacgacgaggcctgcgccgagatctacggcgttcactatggcaagaagaacacagaggagaagatctatctgccccctatccctgccgacgagatcagaaatcctgtggtgctgagggccctgtcccaggcaagaaaagtgatcaacggagtggtgcgccggtacggatctccagcccggatccacatcgagaccgccagagaagtgggcaagagcttcaaggaccggaaggagatcgcgaagagacaggaggagaatcgcaaggatcgggagaaggccgccgccaagtttagggagtacttccctaactttgtgggcgagccaaagtctaaggacatcctgaagctgcgcctgtacgagcagcagcacggcaagtgtctgtatagcggcaaagagatcaatctggtgcggctgaacgagaagggctatgtggagatcgatcacgccctgcctttctccagaacctgggacgattcttttaacaataaggtgctggtgctgggcagcgagaaccagaataagggcaatcagacaccatacgagtatttcaatggcaaggacaactccagggagtggcaggagttcaaggcccgcgtggagacctctagatttcccagtagcaagaagcagcggatcctgctgcagaagttcgacgaggatggctttaaggagtgcaacctgaatgacaccagatacgtgaaccggttcctgtgccagtttgtggccgatcacatcctgctgaccggcaagggcaagagaagggtggtcgcctctaatggccagatcacaaacctgctgagggggttttggagactgaggaaggtgcgggcagagaatgacagacaccacgcactggatgcagtggtggtggcatgcagcaccgtggcaatgcagcagaagatcacaagattcgtgaggtataaggagatgaacgcctttgacggcaagaccgtcgataaggagacaggcaaggtgctgtaccagaagacccacttcccccagccttgggagttctttgcccaggaagttatgatccgggtgttcggcaagccagacggcaagcctgagtttgaggaggccgataccccagagaagctgaggacactgctggcagagaagctgtctagcaggccagaggcagtgcacgagtacgtgaccccgctgttcgtgtccagggcacccaatcggaagatgtctggcgcccacaaggacacactgagaagcgccaagaggtttgtgaagcacaacgagaagatctccgtgaagagagtgtggctgaccgagatcaagctggccgatctggagaacatggtgaattacaagaacggcagggagatcgagctgtatgaggccctgaaggcaaggctggaggcctacggaggaaatgccaagcaggccttcgacccaaaggataaccccttttataagaagggaggacagctggtgaaggccgtgcgggtggagaagacccagaaaagcggcgtgctgctgaataagaagaacgcctacacaatcgccgacaatggtgatatggtgagagtggacgtgttctgtaaggtggataagaagggcaagaatcagtactttatcgtgcctatctatgcctggcaggtggccgagaacatcctgccagacatcgattgcaagggctacagaatcgacgatagctatacattctgtttttccctgcacaagtatgacctgatcgccttccagaaggatgagaagtccaaggtggagtttgcctactatatcaattgcgactcctctagcggcgggttctacctggcctggcacgataagggcagcagggagcagcggtttcgcatctccacccagaatctggcgctgatccagaagtatcaggtgaacgagctgggcaaggagatcaggccatgtcggctgaagaagcgcccacccgtgagcggcgggagcggcgggagcggggggagcactaatctgagcgacatcattgagaaggagactgggaaacagctggtcattcaggagtccatcctgatgctgcctgaggaggtggaggaagtgatcggcaacaagccagagtctgacatcctggtgcacaccgcctacgacgagtccacagatgagaatgtgatgctgctgacctctgacgcccccgagtataagccttgggccctggtcatccaggattctaacggcgagaataagatcaagatgctgagcggaggatccggaggatctggaggcagcaccaacctgtctgacatcatcgagaaggagacaggcaagcagctggtcatccaggagagcatcctgatgctgcccgaagaagtcgaagaagtgatcggaaacaagcctgagagcgatatcctggtccataccgcctacgacgagagtaccgacgaaaatgtgatgctgctgacatccgacgccccagagtataagccctgggctctggtcatccaggattccaacggagagaacaaaatcaaaatgctgtctggcggctcaaaaagaaccgccgacggcagcgaattcgagcccaagaagaagaggaaagtctaaccggtcatcatcaccatcaccattgagtttaaacccgctgatcagcctcgactgtgccttctagttgccagccatctgttgtttgcccctcccccgtgccttccttgaccctggaaggtgccactcccactgtcctttcctaataaaatgaggaaattgcatcgcattgtctgagtaggtgtcattctattctggggggtggggtggggcaggacagcaagggggaggattgggaagacaatagcaggcatgctggggatgcggtgggctctatggcttctgaggcggaaagaaccagctggggctcgataccgtcgacctctagctagagcttggcgtaatcatggtcatagctgtttcctgtgtgaaattgttatccgctcacaattccacacaacatacgagccggaagcataaagtgtaaagcctagggtgcctaatgagtgagctaactcacattaattgcgttgcgctcactgcccgctttccagtcgggaaacctgtcgtgccagctgcattaatgaatcggccaacgcgcggggagaggcggtttgcgtattgggcgcacttccgcttcctcgctcactgactcgctgcgctcggtcgttcggctgcggcgagcggtatcagctcactcaaaggcggtaatacggttatccacagaatcaggggataacgcaggaaagaacatgtgagcaaaaggccagcaaaaggccaggaaccgtaaaaaggccgcgttgctggcgtttttccataggctccgcccccctgacgagcatcacaaaaatcgacgctcaagtcagaggtggcgaaacccgacaggactataaagataccaggcgtttccccctggaagctccctcgtgcgctctcctgttccgaccctgccgcttaccggatacctgtccgcctttctcccttcgggaagcgtggcgctttctcatagctcacgctgtaggtatctcagttcggtgtaggtcgttcgctccaagctgggctgtgtgcacgaaccccccgttcagcccgaccgctgcgccttatccggtaactatcgtcttgagtccaacccggtaagacacgacttatcgccactggcagcagccactggtaacaggattagcagagcgaggtatgtaggcggtgctacagagttcttgaagtggtggcctaactacggctacactagaagaacagtatttggtatctgcgctctgctgaagccagttaccttcggaaaaagagttggtagctcttgatccggcaaacaaaccaccgctggtagcggtggtttttttgtttgcaagcagcagattacgcgcagaaaaaaaggatctcaagaagatcctttgatcttttctacggggtctgacactcagtggaacgaaaactcacgttaagggattttggtcatgagattatcaaaaaggatcttcacctagatccttttaaattaaaaatgaagttttaaatcaatctaaagtatatatgagtaaacttggtctgacagttaccaatgcttaatcagtgaggcacctatctcagcgatctgtctatttcgttcatccatagttgcctgactccccgtcgtgtagataactacgatacgggagggcttaccatctggccccagtgctgcaatgataccgcgggacccacgctcaccggctccagatttatcagcaataaaccagccagccggaagggccgagcgcagaagtggtcctgcaactttatccgcctccatccagtctattaattgttgccgggaagctagagtaagtagttcgccagttaatagtttgcgcaacgttgttgccattgctacaggcatcgtggtgtcacgctcgtcgtttggtatggcttcattcagctccggttcccaacgatcaaggcgagttacatgatcccccatgttgtgcaaaaaagcggttagctccttcggtcctccgatcgttgtcagaagtaagttggccgcagtgttatcactcatggttatggcagcactgcataattctcttactgtcatgccatccgtaagatgcttttctgtgactggtgagtactcaaccaagtcattctgagaatagtgtatgcggcgaccgagttgctcttgcccggcgtcaatacgggataataccgcgccacatagcagaactttaaaagtgctcatcattggaaaacgttcttcggggcgaaaactctcaaggatcttaccgctgttgagatccagttcgatgtaacccactcgtgcacccaactgatcttcagcatcttttactttcaccagcgtttctgggtgagcaaaaacaggaaggcaaaatgccgcaaaaaagggaataagggcgacacggaaatgttgaatactcatactcttcctttttcaatattattgaagcatttatcagggttattgtctcatgagcggatacatatttgaatgtatttagaaaaataaacaaataggggttccgcgcacatttccccgaaaagtgccacctgacgtcgacggatcgggagatcgatctcccgatcccctagggtcgactctcagtacaatctgctctgatgccgcatagttaagccagtatctgctccctgcttgtgtgttggaggtcgctgagtagtgcgcgagcaaaatttaagctacaacaaggcaaggcttgaccgacaattgcatgaagaatctgcttagggttaggcgttttgcgctgcttcgcgatgtacgggccagatatacgcgttgacattgattattgac

SEQ ID NO: 549 - DNA, 7347 bp, synthetic construct
  source 1..7347: mol_type = other DNA
attgatgcagtaatcatagcctacgctaacaacagcatcgtgaaagccttctccgatttcaagaaagaacaggagtctaatagcgccgagttgtacgccaagaaaatttccgaattggactataaaaataagagaaaattcttcgaacccttctccgggtttcgccaaaaggtcttagataagatcgacgagattttcgtttccaagcccgaaagaaaaaagccttcaggggcactgcacgaagagacattccgcaaggaagaggaattttaccaatcttacggtggtaaagagggagttctgaaggctctggagcttgggaagatccgcaaggtaaacgggaaaatcgtgaaaaacggggacatgttcagggtggatatcttcaagcacaaaaagaccaacaagttctacgcagtacccatctacactatggatttcgctttaaaggttctcccaaataaggcggtggctcgatcgaagaaaggagagatcaaggactggatcttaatggatgaaaattacgagttttgcttctcgctctacaaagatagcctgattctgatccagacaaaaaagatgcaggaaccagaatttgtttattataacgccttcacgagcagtacagtgtccctgattgtgagcaagcatgataacaagttcgagactctgtctaagaatcagaaaatccttttcaagaacgccaacgagaaggaggtcatcgcaaagtcaattggcatccaaaacctgaaggtgttcgagaaatacatagtgtccgcactcggtgaagtaactaaagccgaatttcgacagcgcgaggattttaagaaaagcggcgggagcggcgggagcggggggagcactaatctgagcgacatcattgagaaggagactgggaaacagctggtcattcaggagtccatcctgatgctgcctgaggaggtggaggaagtgatcggcaacaagccagagtctgacatcctggtgcacaccgcctacgacgagtccacagatgagaatgtgatgctgctgacctctgacgcccccgagtataagccttgggccctggtcatccaggattctaacggcgagaataagatcaagatgctgagcggaggatccaaaagaaccgccgacggcagcgaattcgagcccaagaagaagaggaaagtctaaccggtcatcatcaccatcaccattgagtttaaacccgctgatcagcctcgactgtgccttctagttgccagccatctgttgtttgcccctcccccgtgccttccttgaccctggaaggtgccactcccactgtcctttcctaataaaatgaggaaattgcatcgcattgtctgagtaggtgtcattctattctggggggtggggtggggcaggacagcaagggggaggattgggaagacaatagcaggcatgctggggatgcggtgggctctatggcttctgaggcggaaagaaccagctggggctcgataccgtcgacctctagctagagcttggcgtaatcatggtcatagctgtttcctgtgtgaaattgttatccgctcacaattccacacaacatacgagccggaagcataaagtgtaaagcctagggtgcctaatgagtgagctaactcacattaattgcgttgcgctcactgcccgctttccagtcgggaaacctgtcgtgccagctgcattaatgaatcggccaacgcgcggggagaggcggtttgcgtattgggcgcacttccgcttcctcgctcactgactcgctgcgctcggtcgttcggctgcggcgagcggtatcagctcactcaaaggcggtaatacggttatccacagaatcaggggataacgcaggaaagaacatgtgagcaaaaggccagcaaaaggccaggaaccgtaaaaaggccgcgttgctggcgtttttccataggctccgcccccctgacgagcatcacaaaaatcgacgctcaagtcagaggtggcgaaacccgacaggactataaagataccaggcgtttccccctggaagctccctcgtgcgctctcctgttccgaccctgccgcttaccggatacctgtccgcctttctcccttcgggaagcgtggcgctttctcatagctcacgctgtaggtatctcagttcggtgtaggtcgttcgctccaagctgggctgtgtgcacgaaccccccgttcagcccgaccgctgcgccttatccggtaactatcgtcttgagtccaacccggtaagacacgacttatcgccactggcagcagccactggtaacaggattagcagagcgaggtatgtaggcggtgctacagagttcttgaagtggtggcctaactacggctacactagaagaacagtatttggtatctgcgctctgctgaagccagttaccttcggaaaaagagttggtagctcttgatccggcaaacaaaccaccgctggtagcggtggtttttttgtttgcaagcagcagattacgcgcagaaaaaaaggatctcaagaagatcctttgatcttttctacggggtctgacactcagtggaacgaaaactcacgttaagggattttggtcatgagattatcaaaaaggatcttcacctagatccttttaaattaaaaatgaagttttaaatcaatctaaagtatatatgagtaaacttggtctgacagttaccaatgcttaatcagtgaggcacctatctcagcgatctgtctatttcgttcatccatagttgcctgactccccgtcgtgtagataactacgatacgggagggcttaccatctggccccagtgctgcaatgataccgcgggacccacgctcaccggctccagatttatcagcaataaaccagccagccggaagggccgagcgcagaagtggtcctgcaactttatccgcctccatccagtctattaattgttgccgggaagctagagtaagtagttcgccagttaatagtttgcgcaacgttgttgccattgctacaggcatcgtggtgtcacgctcgtcgtttggtatggcttcattcagctccggttcccaacgatcaaggcgagttacatgatcccccatgttgtgcaaaaaagcggttagctccttcggtcctccgatcgttgtcagaagtaagttggccgcagtgttatcactcatggttatggcagcactgcataattctcttactgtcatgccatccgtaagatgcttttctgtgactggtgagtactcaaccaagtcattctgagaatagtgtatgcggcgaccgagttgctcttgcccggcgtcaatacgggataataccgcgccacatagcagaactttaaaagtgctcatcattggaaaacgttcttcggggcgaaaactctcaaggatcttaccgctgttgagatccagttcgatgtaacccactcgtgcacccaactgatcttcagcatcttttactttcaccagcgtttctgggtgagcaaaaacaggaaggcaaaatgccgcaaaaaagggaataagggcgacacggaaatgttgaatactcatactcttcctttttcaatattattgaagcatttatcagggttattgtctcatgagcggatacatatttgaatgtatttagaaaaataaacaaataggggttccgcgcacatttccccgaaaagtgccacctgacgtcgacggatcgggagatcgatctcccgatcccctagggtcgactctcagtacaatctgctctgatgccgcatagttaagccagtatctgctccctgcttgtgtgttggaggtcgctgagtagtgcgcgagcaaaatttaagctacaacaaggcaaggcttgaccgacaattgcatgaagaatctgcttagggttaggcgttttgcgctgcttcgcgatgtacgggccagatatacgcgttgacattgattattgactagttattaatagtaatcaattacggggtcattagttcatagcccatatatggagttccgcgttacataacttacggtaaatggcccgcctggctgaccgcccaacgacccccgcccattgacgtcaataatgacgtatgttcccatagtaacgccaatagggactttccattgacgtcaatgggtggagtatttacggtaaactgcccacttggcagtacatcaagtgtatcatatgccaagtacgccccctattgacgtcaatgacggtaaatggcccgcctggcattatgcccagtacatgaccttatgggactttcctacttggcagtacatctacgtattagtcatcgctattaccatggtgatgcggttttggcagtacatcaatgggcgtggatagcggtttgactcacggggatttccaagtctccaccccattgacgtcaatgggagtttgttttggcaccaaaatcaacgggactttccaaaatgtcgtaacaactccgccccattgacgcaaatgggcggtaggcgtgtacggtgggaggtctatataagcagagctggtttagtgaaccgtcagatccgctagagatccgcggccgctaatacgactcactatagggagagccgccaccatgaaacggacagccgacggaagcgagttcgagtcaccaaagaagaagcggaaagtcagttctgaggtggagttttcccacgagtactggatgagacatgccctgaccctggccaagagggcacgggatgagggggcgggtcctgtgggagccgtgctggtgctgaacaatagagtgatcggcgagggctggaacagagccatcggcctgcacgacccaacagcccatgccgaaattatggccctgagacagggcggcctggtcatgcagaactacagactgtttgacgccaccctgtacgtgacattcgagccttgcgtgatgtgcgccggcgccatgatcaactctaggatcggccgcgtggtgtttggcgtgaggaactcaaaaagaggcgccgcaggctccctgatgaacgtgctgaactaccccggcatgaatcaccgcgtcgaaattaccgagggaatcctggcagatgaatgtgccgccctgctgtgcgatttctatcggatgcctagacaggtgttcaattctcagaagaaggcccagagctccatcaactctggcggatctagcggaggatcctctggcagcgagacaccaggaacaagcgagtcagcaacaccagagagcagtggcggcagcagcggcggcagcgcccgcatcctcgctttcgcaatcggaatctctagtatcggatgggccttctctgaaaacgacgaactgaaagactgcggcgtgagaatcttcacaaaggttgaaaaccctaaaacaggcgagtctttagctctgccacgtaggttggcccgctccgcccgaaaaaggtatgctcggcggaaggctcgcctcaaccacttgaagcatttgatagctaatgagttcaaactgaactacgaagattaccagtccttcgacgagtcattggcaaaagcctacaaaggcagccttatcagtccttatgagttgagatttcgcgcactcaacgaactgctttctaagcaagactttgctagggtcattctgcacatcgcaaaacggcgaggttatgacgatatcaagaactccgacgataaagaaaagggagccattctcaaggcgatcaaacagaatgaggaaaaattggcaaactaccagagtgtgggcgagtatctgtataaagagtatttccagaagtttaaggaaaacagcaaggagtttacaaacgtcagaaataaaaaggagtcttacgagagatgcatcgcgcagtcattcctcaaagatgagctgaagctgatatttaagaagcaacgcgaatttggtttctcattctctaagaagttcgaagaggaggttctttccgtggcgttttacaagagggcgctcaaagacttctcccacctggttggtaactgtagtttcttcacggatgagaagcgagctcccaaaaattctcccctggctttcatgtttgttgccctgactcggatcattaacctgctgaacaacctgaaaaatactgaagggatcttgtatacgaaggacgacctaaatgcactcctgaatgaagtgctcaaaaacggaactctaacctataaacagaccaagaaattactggggctctctgacgactacgagttcaagggcgagaagggtacttattttatcgaattcaaaaagtataaggagttcattaaagcattgggggaacacaacctcagccaggacgatctcaatgaaattgccaaggacatcacgctgattaaagacgagataaaactgaaaaaggcactggccaagtatgacctcaaccagaaccagatcgactctctgtccaagctggagttcaaagaccacctaaacatatccttcaaagccctgaaactggtcacccctctaatgctcgaaggaaaaaaatacgacgaggcgtgtaatgaactgaatcttaaggtggccatcaatgaggataagaaggactttcttccagcctttaacgagacatattacaaagacgaggtcacaaacccggttgtgctgagggccataaaagagtatcggaaggttctgaatgccctcctgaagaagtacggcaaagtgcacaaaataaatatcgaattggctagggaggtggggaagaaccattctcagcgagcaaagatcgagaaagagcagaatgagaactacaaagccaagaaagacgccgaactggagtgcgaaaagctggggcttaaaataaacagtaaaaacatcctgaaattaagattgttcaaagagcaaaaggagttttgcgcctactcaggggaaaaaatcaaaatatcagacctgcaggacgagaaaatgctggagatcgaccatatctatccgtatagcaggtcatttgacgattcctacatgaacaaagtgcttgtgtttaccaaacagaaccaagaaaagctgaaccaaaccccctttgaggctttcggaaacgactcagccaagtggcagaaaatcgaagtcctagccaagaatctgcctacaaaaaaacaaaagaggattcttgataagaactataaggacaaggaacagaaaaactttaaagacaggaacctgaatgacacgaggtacattgcgcgactggttctaaactataccaaagactacctggatttcctccctctgagcgacgacgagaatactaaactgaatgatacccagaaaggctcaaaggtccacgttgaggctaagtccgggatgctgactagcgccctccgccacacgtggggcttcagcgccaaagatcggaataatcatcttcatcacgct

SEQ ID NO: 550 - DNA, 8778 bp, synthetic construct
  source 1..8778: mol_type = other DNA
tagttattaatagtaatcaattacggggtcattagttcatagcccatatatggagttccgcgttacataacttacggtaaatggcccgcctggctgaccgcccaacgacccccgcccattgacgtcaataatgacgtatgttcccatagtaacgccaatagggactttccattgacgtcaatgggtggagtatttacggtaaactgcccacttggcagtacatcaagtgtatcatatgccaagtacgccccctattgacgtcaatgacggtaaatggcccgcctggcattatgcccagtacatgaccttatgggactttcctacttggcagtacatctacgtattagtcatcgctattaccatggtgatgcggttttggcagtacatcaatgggcgtggatagcggtttgactcacggggatttccaagtctccaccccattgacgtcaatgggagtttgttttggcaccaaaatcaacgggactttccaaaatgtcgtaacaactccgccccattgacgcaaatgggcggtaggcgtgtacggtgggaggtctatataagcagagctggtttagtgaaccgtcagatccgctagagatccgcggccgctaatacgactcactatagggagagccgccaccatgaaacggacagccgacggaagcgagttcgagtcaccaaagaagaagcggaaagtcagttctgaggtggagttttcccacgagtactggatgagacatgccctgaccctggccaagagggcacgggatgagggggcgggtcctgtgggagccgtgctggtgctgaacaatagagtgatcggcgagggctggaacagagccatcggcctgcacgacccaacagcccatgccgaaattatggccctgagacagggcggcctggtcatgcagaactacagactgtttgacgccaccctgtacgtgacattcgagccttgcgtgatgtgcgccggcgccatgatcaactctaggatcggccgcgtggtgtttggcgtgaggaactcaaaaagaggcgccgcaggctccctgatgaacgtgctgaactaccccggcatgaatcaccgcgtcgaaattaccgagggaatcctggcagatgaatgtgccgccctgctgtgcgatttctatcggatgcctagacaggtgttcaattctcagaagaaggcccagagctccatcaactctggcggatctagcggaggatcctctggcagcgagacaccaggaacaagcgagtcagcaacaccagagagcagtggcggcagcagcggcggcagcgacaagaagtacagcatcggcctggccatcggcaccaactctgtgggctgggccgtgatcaccgacgagtacaaggtgcccagcaagaaattcaaggtgctgggcaacaccgaccggcacagcatcaagaagaacctgatcggagccctgctgttcgacagcggcgaaacagccgaggccacccggctgaagagaaccgccagaagaagatacaccagacggaagaaccggatctgctatctgcaagagatcttcagcaacgagatggccaaggtggacgacagcttcttccacagactggaagagtccttcctggtggaagaggataagaagcacgagcggcaccccatcttcggcaacatcgtggacgaggtggcctaccacgagaagtaccccaccatctaccacctgagaaagaaactggtggacagcaccgacaaggccgacctgcggctgatctatctggccctggcccacatgatcaagttccggggccacttcctgatcgagggcgacctgaaccccgacaacagcgacgtggacaagctgttcatccagctggtgcagacctacaaccagctgttcgaggaaaaccccatcaacgccagcggcgtggacgccaaggccatcctgtctgccagactgagcaagagcagacggctggaaaatctgatcgcccagctgcccggcgagaagaagaatggcctgttcggaaacctgattgccctgagcctgggcctgacccccaacttcaagagcaacttcgacctggccgaggatgccaaactgcagctgagcaaggacacctacgacgacgacctggacaacctgctggcccagatcggcgaccagtacgccgacctgtttctggccgccaagaacctgtccgacgccatcctgctgagcgacatcctgagagtgaacaccgagatcaccaaggcccccctgagcgcctctatgatcaagagatacgacgagcaccaccaggacctgaccctgctgaaagctctcgtgcggcagcagctgcctgagaagtacaaagagattttcttcgaccagagcaagaacggctacgccggctacattgacggcggagccagccaggaagagttctacaagttcatcaagcccatcctggaaaagatggacggcaccgaggaactgctcgtgaagctgaacagagaggacctgctgcggaagcagcggaccttcgacaacggcagcatcccccaccagatccacctgggagagctgcacgccattctgcggcggcaggaagatttttacccattcctgaaggacaaccgggaaaagatcgagaagatcctgaccttccgcatcccctactacgtgggccctctggccaggggaaacagcagattcgcctggatgaccagaaagagcgaggaaaccatcaccccctggaacttcgaggaagtggtggacaagggcgcttccgcccagagcttcatcgagcggatgaccaacttcgataagaacctgcccaacgagaaggtgctgcccaagcacagcctgctgtacgagtacttcaccgtgtataacgagctgaccaaagtgaaatacgtgaccgagggaatgagaaagcccgccttcctgagcggcgagcagaaaaaggccatcgtggacctgctgttcaagaccaaccggaaagtgaccgtgaagcagctgaaagaggactacttcaagaaaatcgagtgcttcgactccgtggaaatctccggcgtggaagatcggttcaacgcctccctgggcacataccacgatctgctgaaaattatcaaggacaaggacttcctggacaatgaggaaaacgaggacattctggaagatatcgtgctgaccctgacactgtttgaggacagagagatgatcgaggaacggctgaaaacctatgcccacctgttcgacgacaaagtgatgaagcagctgaagcggcggagatacaccggctggggcaggctgagccggaagctgatcaacggcatccgggacaagcagtccggcaagacaatcctggatttcctgaagtccgacggcttcgccaacagaaacttcatgcagctgatccacgacgacagcctgacctttaaagaggacatccagaaagcccaggtgtccggccagggcgatagcctgcacgagcacattgccaatctggccggcagccccgccattaagaagggcatcctgcagacagtgaaggtggtggacgagctcgtgaaagtgatgggccggcacaagcccgagaacatcgtgatcgaaatggccagagagaaccagaccacccagaagggacagaagaacagccgcgagagaatgaagcggatcgaagagggcatcaaagagctgggcagccagatcctgaaagaacaccccgtggaaaacacccagctgcagaacgagaagctgtacctgtactacctgcagaatgggcgggatatgtacgtggaccaggaactggacatcaaccggctgtccgactacgatgtggaccatatcgtgcctcagagctttctgaaggacgactccatcgacaacaaggtgctgaccagaagcgacaagaaccggggcaagagcgacaacgtgccctccgaagaggtcgtgaagaagatgaagaactactggcggcagctgctgaacgccaagctgattacccagagaaagttcgacaatctgaccaaggccgagagaggcggcctgagcgaactggataaggccggcttcatcaagagacagctggtggaaacccggcagatcacaaagcacgtggcacagatcctggactcccggatgaacactaagtacgacgagaatgacaagctgatccgggaagtgaaagtgatcaccctgaagtccaagctggtgtccgatttccggaaggatttccagttttacaaagtgcgcgagatcaacaactaccaccacgcccacgacgcctacctgaacgccgtcgtgggaaccgccctgatcaaaaagtaccctaagctggaaagcgagttcgtgtacggcgactacaaggtgtacgacgtgcggaagatgatcgccaagagcgagcaggaaatcggcaaggctaccgccaagtacttcttctacagcaacatcatgaactttttcaagaccgagattaccctggccaacggcgagatccggaagcggcctctgatcgagacaaacggcgaaaccggggagatcgtgtgggataagggccgggattttgccaccgtgcggaaagtgctgagcatgccccaagtgaatatcgtgaaaaagaccgaggtgcagacaggcggcttcagcaaagagtctatcctgcccaagaggaacagcgataagctgatcgccagaaagaaggactgggaccctaagaagtacggcggcttcgacagccccaccgtggcctattctgtgctggtggtggccaaagtggaaaagggcaagtccaagaaactgaagagtgtgaaagagctgctggggatcaccatcatggaaagaagcagcttcgagaagaatcccatcgactttctggaagccaagggctacaaagaagtgaaaaaggacctgatcatcaagctgcctaagtactccctgttcgagctggaaaacggccggaagagaatgctggcctctgccggcgaactgcagaagggaaacgaactggccctgccctccaaatatgtgaacttcctgtacctggccagccactatgagaagctgaagggctcccccgaggataatgagcagaaacagctgtttgtggaacagcacaagcactacctggacgagatcatcgagcagatcagcgagttctccaagagagtgatcctggccgacgctaatctggacaaagtgctgtccgcctacaacaagcaccgggataagcccatcagagagcaggccgagaatatcatccacctgtttaccctgaccaatctgggagcccctgccgccttcaagtactttgacaccaccatcgaccggaagaggtacaccagcaccaaagaggtgctggacgccaccctgatccaccagagcatcaccggcctgtacgagacacggatcgacctgtctcagctgggaggtgacagcggcgggagcggcgggagcggggggagcactaatctgagcgacatcattgagaaggagactgggaaacagctggtcattcaggagtccatcctgatgctgcctgaggaggtggaggaagtgatcggcaacaagccagagtctgacatcctggtgcacaccgcctacgacgagtccacagatgagaatgtgatgctgctgacctctgacgcccccgagtataagccttgggccctggtcatccaggattctaacggcgagaataagatcaagatgctgagcggaggatccggaggatctggaggcagcaccaacctgtctgacatcatcgagaaggagacaggcaagcagctggtcatccaggagagcatcctgatgctgcccgaagaagtcgaagaagtgatcggaaacaagcctgagagcgatatcctggtccataccgcctacgacgagagtaccgacgaaaatgtgatgctgctgacatccgacgccccagagtataagccctgggctctggtcatccaggattccaacggagagaacaaaatcaaaatgctgtctggcggctcaaaaagaaccgccgacggcagcgaattcgagcccaagaagaagaggaaagtctaaccggtcatcatcaccatcaccattgagtttaaacccgctgatcagcctcgactgtgccttctagttgccagccatctgttgtttgcccctcccccgtgccttccttgaccctggaaggtgccactcccactgtcctttcctaataaaatgaggaaattgcatcgcattgtctgagtaggtgtcattctattctggggggtggggtggggcaggacagcaagggggaggattgggaagacaatagcaggcatgctggggatgcggtgggctctatggcttctgaggcggaaagaaccagctggggctcgataccgtcgacctctagctagagcttggcgtaatcatggtcatagctgtttcctgtgtgaaattgttatccgctcacaattccacacaacatacgagccggaagcataaagtgtaaagcctagggtgcctaatgagtgagctaactcacattaattgcgttgcgctcactgcccgctttccagtcgggaaacctgtcgtgccagctgcattaatgaatcggccaacgcgcgggaagaggcggtttgcgtattgggcgcacttccgcttcctcgctcactgactcgctgcgctcggtcgttcggctgcggcgagcggtatcagctcactcaaaggcggtaatacggttatccacagaatcaggggataacgcaggaaagaacatgtgagcaaaaggccagcaaaaggccaggaaccgtaaaaaggccgcgttgctggcgtttttccataggctccgcccccctgacgagcatcacaaaaatcgacgctcaagtcagaggtggcgaaacccgacaggactataaagataccaggcgtttccccctggaagctccctcgtgcgctctcctgttccgaccctgccgcttaccggatacctgtccgcctttctcccttcgggaagcgtggcgctttctcatagctcacgctgtaggtatctcagttcggtgtaggtcgttcgctccaagctgggctgtgtgcacgaaccccccgttcagcccgaccgctgcgccttatccggtaactatcgtcttgagtccaacccggtaagacacgacttatcgccactggcagcagccactggtaacaggattagcagagcgaggtatgtaggcggtgctacagagttcttgaagtggtggcctaactacggctacactagaagaacagtatttggtatctgcgctctgctgaagccagttaccttcggaaaaagagttggtagctcttgatccggcaaacaaaccaccgctggtagcggtggtttttttgtttgcaagcagcagattacgcgcagaaaaaaaggatctcaagaaaatcctttgatcttttctacggggtctgacactcagtggaacgaaaactcacgttaagggattttggtcatgagattatcaaaaaggatcttcacctagatccttttaaattaaaaatgaagttttaaatcaatctaaagtatatatgagtaaacttggtctgacagttaccaatgcttaatcagtgaggcacctatctcagcgatctgtctatttcgttcatccatagttgcctgactccccgtcgtgtagataactacgatacgggagggcttaccatctggccccagtgctgcaatgataccgcgggacccacgctcaccggctccagatttatcagcaataaaccagccagccggaagggccgagcgcagaagtggtcctgcaactttatccgcctccatccagtctattaattgttgccgggaagctagagtaagtagttcgccagttaatagtttgcgcaacgttgttgccattgctacaggcatcgtggtgtcacgctcgtcgtttggtatggcttcattcagctccggttcccaacgatcaaggcgagttacatgatcccccatgttgtgcaaaaaagcggttagctccttcggtcctccgatcgttgtcagaagtaagttggccgcagtgttatcactcatggttatggcagcactgcataattctcttactgtcatgccatccgtaagatgcttttctgtgactggtgagtactcaaccaagtcattctgagaatagtgtatgcggcgaccgagttgctcttgcccggcgtcaatacgggataataccgcgccacatagcagaactttaaaagtgctcatcattggaaaacgttcttcggggcgaaaactctcaaggatcttaccgctgttgagatccagttcgatgtaacccactcgtgcacccaactgatcttcagcatcttttactttcaccagcgtttctgggtgagcaaaaacaggaaggcaaaatgccgcaaaaaagggaataagggcgacacggaaatgttgaatactcatactcttcctttttcaatattattgaagcatttatcagggttattgtctcatgagcggatacatatttgaatgtatttagaaaaataaacaaataggggttccgcgcacatttccccgaaaagtgccacctgacgtcgacggatcgggagatcgatctcccgatcccctagggtcgactctcagtacaatctgctctgatgccgcatagttaagccagtatctgctccctgcttgtgtgttggaggtcgctgagtagtgcgcgagcaaaatttaagctacaacaaggcaaggcttgaccgacaattgcatgaagaatctgcttagggttaggcgttttgcgctgcttcgcgatgtacgggccagatatacgcgttgacattgattattgac

SEQ ID NO: 551 - DNA, 7836 bp, synthetic construct
  source 1..7836: mol_type = other DNA
tagttattaatagtaatcaattacggggtcattagttcatagcccatatatggagttccgcgttacataacttacggtaaatggcccgcctggctgaccgcccaacgacccccgcccattgacgtcaataatgacgtatgttcccatagtaacgccaatagggactttccattgacgtcaatgggtggagtatttacggtaaactgcccacttggcagtacatcaagtgtatcatatgccaagtacgccccctattgacgtcaatgacggtaaatggcccgcctggcattatgcccagtacatgaccttatgggactttcctacttggcagtacatctacgtattagtcatcgctattaccatggtgatgcggttttggcagtacatcaatgggcgtggatagcggtttgactcacggggatttccaagtctccaccccattgacgtcaatgggagtttgttttggcaccaaaatcaacgggactttccaaaatgtcgtaacaactccgccccattgacgcaaatgggcggtaggcgtgtacggtgggaggtctatataagcagagctggtttagtgaaccgtcagatccgctagagatccgcggccgctaatacgactcactatagggagagccgccaccatgaaacggacagccgacggaagcgagttcgagtcaccaaagaagaagcggaaagtcagttctgaggtggagttttcccacgagtactggatgagacatgccctgaccctggccaagagggcacgggatgagggggcgggtcctgtgggagccgtgctggtgctgaacaatagagtgatcggcgagggctggaacagagccatcggcctgcacgacccaacagcccatgccgaaattatggccctgagacagggcggcctggtcatgcagaactacagactgtttgacgccaccctgtacgtgacattcgagccttgcgtgatgtgcgccggcgccatgatcaactctaggatcggccgcgtggtgtttggcgtgaggaactcaaaaagaggcgccgcaggctccctgatgaacgtgctgaactaccccggcatgaatcaccgcgtcgaaattaccgagggaatcctggcagatgaatgtgccgccctgctgtgcgatttctatcggatgcctagacaggtgttcaattctcagaagaaggcccagagctccatcaactctggcggatctagcggaggatcctctggcagcgagacaccaggaacaagcgagtcagcaacaccagagagcagtggcggcagcagcggcggcagcgggaagcgaaattacattctggggctggccattggcattacatcagtgggctatggcatcattgactacgagacaagggacgtgatcgacgccggcgtgagactgttcaaggaggccaacgtggagaacaatgagggccggagatccaagaggggagcaaggcgcctgaagcggagaaggcgccacagaatccagagagtgaagaagctgctgttcgattacaacctgctgaccgaccactccgagctgtctggcatcaatccttatgaggccagagtgaagggcctgtcccagaagctgtctgaggaggagtttagcgccgccctgctgcacctggcaaagaggagaggcgtgcacaacgtgaatgaggtggaggaggacaccggcaacgagctgtccacaaaggagcagatcagccgcaattccaaggccctggaggagaagtatgtggccgagctgcagctggagcggctgaagaaggatggcgaggtgaggggctccatcaatcgcttcaagacctctgactacgtgaaggaggccaagcagctgctgaaggtgcagaaggcctaccaccagctggatcagtcctttatcgatacatatatcgacctgctggagacaaggcgcacatactatgagggaccaggagagggctctcccttcggctggaaggacatcaaggagtggtacgagatgctgatgggccactgcacctattttccagaggagctgagaagcgtgaagtacgcctataacgccgatctgtacaacgccctgaatgacctgaacaacctggtcatcaccagggatgagaacgagaagctggagtactatgagaagttccagatcatcgagaacgtgttcaagcagaagaagaagcctacactgaagcagatcgccaaggagatcctggtgaacgaggaggacatcaagggctaccgcgtgacctccacaggcaagccagagttcaccaatctgaaggtgtatcacgatatcaaggacatcacagcccggaaggagatcatcgagaacgccgagctgctggatcagatcgccaagatcctgaccatctatcagagctccgaggacatccaggaggagctgaccaacctgaatagcgagctgacacaggaggagatcgagcagatcagcaatctgaagggctacaccggcacacacaacctgagcctgaaggccatcaatctgatcctggatgagctgtggcacacaaacgacaatcagatcgccatctttaaccggctgaagctggtgccaaagaaggtggacctgtcccagcagaaggagatcccaaccacactggtggacgatttcatcctgtctcccgtggtgaagcggagcttcatccagagcatcaaagtgatcaacgccatcatcaagaagtacggcctgcccaatgatatcatcatcgagctggccagggagaagaactccaaggacgcccagaagatgatcaatgagatgcagaagaggaaccgccagaccaatgagcggatcgaggagatcatcagaaccacaggcaaggagaacgccaagtacctgatcgagaagatcaagctgcacgatatgcaggagggcaagtgtctgtattctctggaggccatccctctggaggacctgctgaacaatccattcaactacgaggtggatcacatcatcccccggagcgtgagcttcgacaattcttttaacaataaggtgctggtgaagcaggaggagaacagcaagaagggcaataggacccctttccagtacctgtctagctccgattctaagatcagctacgagacattcaagaagcacatcctgaatctggccaagggcaagggccgcatcagcaagaccaagaaggagtacctgctggaggagcgggacatcaacagattctccgtgcagaaggacttcatcaaccggaatctggtggacaccagatacgccacacgcggcctgatgaatctgctgcggtcttatttcagagtgaacaatctggatgtgaaggtaaagagcatcaacggcggcttcacctcctttctgcggagaaagtggaagtttaagaaggagcgcaacaagggctataagcaccacgccgaggatgccctgatcatcgccaatgccgacttcatctttaaggagtggaagaagctggacaaggccaagaaagtgatggagaaccagatgttcgaggagaagcaggccgagagcatgcccgagatcgagacagagcaggagtacaaggagattttcatcacacctcaccagatcaagcacatcaaggacttcaaggactacaagtattctcacagggtggataagaagcccaaccgcgagctgatcaatgacaccctgtatagcacacggaaggacgataagggcaataccctgatcgtgaacaatctgaacggcctgtacgacaaggataatgacaagctgaagaagctgatcaacaagtctcccgagaagctgctgatgtaccaccacgatcctcagacatatcagaagctgaagctgatcatggagcagtacggcgacgagaagaacccactgtataagtactatgaggagacaggcaactacctgacaaagtatagcaagaaggataatggccccgtgatcaagaagatcaagtactatggcaacaagctgaatgcccacctggacatcaccgacgattaccctaactctcgcaataaggtggtgaagctgagcctgaagccataccggttcgacgtgtacctggacaacggcgtgtataagtttgtgacagtgaagaatctggatgtgatcaagaaggagaactactatgaggtgaacagcaagtgctacgaggaggccaagaagctgaagaagatcagcaaccaggccgagttcatcgcctctttttacaacaatgacctgatcaagatcaatggcgagctgtatagagtgatcggcgtgaacaatgatctgctgaacagaatcgaagtgaatatgatcgacatcacctacagggagtatctggagaacatgaatgataagaggccccctcgcatcatcaagaccatcgcctctaagacacagagcatcaagaagtacagcacagacatcctggggaacctgtatgaagtcaagagcaagaaacatcctcagattatcaagaaaggcagcggcgggagcggcgggagcggggggagcactaatctgagcgacatcattgagaaggagactgggaaacagctggtcattcaggagtccatcctgatgctgcctgaggaggtggaggaagtgatcggcaacaagccagagtctgacatcctggtgcacaccgcctacgacgagtccacagatgagaatgtgatgctgctgacctctgacgcccccgagtataagccttgggccctggtcatccaggattctaacggcgagaataagatcaagatgctgagcggaggatccggaggatctggaggcagcaccaacctgtctgacatcatcgagaaggagacaggcaagcagctggtcatccaggagagcatcctgatgctgcccgaagaagtcgaagaagtgatcggaaacaagcctgagagcgatatcctggtccataccgcctacgacgagagtaccgacgaaaatgtgatgctgctgacatccgacgccccagagtataagccctgggctctggtcatccaggattccaacggagagaacaaaatcaaaatgctgtctggcggctcaaaaagaaccgccgacggcagcgaattcgagcccaagaagaagaggaaagtctaaccggtcatcatcaccatcaccattgagtttaaacccgctgatcagcctcgactgtgccttctagttgccagccatctgttgtttgcccctcccccgtgccttccttgaccctggaaggtgccactcccactgtcctttcctaataaaatgaggaaattgcatcgcattgtctgagtaggtgtcattctattctggggggtggggtggggcaggacagcaagggggaggattgggaagacaatagcaggcatgctggggatgcggtgggctctatggcttctgaggcggaaagaaccagctggggctcgataccgtcgacctctagctagagcttggcgtaatcatggtcatagctgtttcctgtgtgaaattgttatccgctcacaattccacacaacatacgagccggaagcataaagtgtaaagcctagggtgcctaatgagtgagctaactcacattaattgcgttgcgctcactgcccgctttccagtcgggaaacctgtcgtgccagctgcattaatgaatcggccaacgcgcgggaagaggcggtttgcgtattgggcgcacttccgcttcctcgctcactgactcgctgcgctcggtcgttcggctgcggcgagcggtatcagctcactcaaaggcggtaatacggttatccacagaatcaggggataacgcaggaaagaacatgtgagcaaaaggccagcaaaaggccaggaaccgtaaaaaggccgcgttgctggcgtttttccataggctccgcccccctgacgagcatcacaaaaatcgacgctcaagtcagaggtggcgaaacccgacaggactataaagataccaggcgtttccccctggaagctccctcgtgcgctctcctgttccgaccctgccgcttaccggatacctgtccgcctttctcccttcgggaagcgtggcgctttctcatagctcacgctgtaggtatctcagttcggtgtaggtcgttcgctccaagctgggctgtgtgcacgaaccccccgttcagcccgaccgctgcgccttatccggtaactatcgtcttgagtccaacccggtaagacacgacttatcgccactggcagcagccactggtaacaggattagcagagcgaggtatgtaggcggtgctacagagttcttgaagtggtggcctaactacggctacactagaagaacagtatttggtatctgcgctctgctgaagccagttaccttcggaaaaagagttggtagctcttgatccggcaaacaaaccaccgctggtagcggtggtttttttgtttgcaagcagcagattacgcgcagaaaaaaaggatctcaagaaaatcctttgatcttttctacggggtctgacactcagtggaacgaaaactcacgttaagggattttggtcatgagattatcaaaaaggatcttcacctagatccttttaaattaaaaatgaagttttaaatcaatctaaagtatatatgagtaaacttggtctgacagttaccaatgcttaatcagtgaggcacctatctcagcgatctgtctatttcgttcatccatagttgcctgactccccgtcgtgtagataactacgatacgggagggcttaccatctggccccagtgctgcaatgataccgcgggacccacgctcaccggctccagatttatcagcaataaaccagccagccggaagggccgagcgcagaagtggtcctgcaactttatccgcctccatccagtctattaattgttgccgggaagctagagtaagtagttcgccagttaatagtttgcgcaacgttgttgccattgctacaggcatcgtggtgtcacgctcgtcgtttggtatggcttcattcagctccggttcccaacgatcaaggcgagttacatgatcccccatgttgtgcaaaaaagcggttagctccttcggtcctccgatcgttgtcagaagtaagttggccgcagtgttatcactcatggttatggcagcactgcataattctcttactgtcatgccatccgtaagatgcttttctgtgactggtgagtactcaaccaagtcattctgagaatagtgtatgcggcgaccgagttgctcttgcccggcgtcaatacgggataataccgcgccacatagcagaactttaaaagtgctcatcattggaaaacgttcttcggggcgaaaactctcaaggatcttaccgctgttgagatccagttcgatgtaacccactcgtgcacccaactgatcttcagcatcttttactttcaccagcgtttctgggtgagcaaaaacaggaaggcaaaatgccgcaaaaaagggaataagggcgacacggaaatgttgaatactcatactcttcctttttcaatattattgaagcatttatcagggttattgtctcatgagcggatacatatttgaatgtatttagaaaaataaacaaataggggttccgcgcacatttccccgaaaagtgccacctgacgtcgacggatcgggagatcgatctcccgatcccctagggtcgactctcagtacaatctgctctgatgccgcatagttaagccagtatctgctccctgcttgtgtgttggaggtcgctgagtagtgcgcgagcaaaatttaagctacaacaaggcaaggcttgaccgacaattgcatgaagaatctgcttagggttaggcgttttgcgctgcttcgcgatgtacgggccagatatacgcgttgacattgattattgac

SEQ ID NO: 552 - DNA, 8778 bp, synthetic construct
  source 1..8778: mol_type = other DNA
tagttattaatagtaatcaattacggggtcattagttcatagcccatatatggagttccgcgttacataacttacggtaaatggcccgcctggctgaccgcccaacgacccccgcccattgacgtcaataatgacgtatgttcccatagtaacgccaatagggactttccattgacgtcaatgggtggagtatttacggtaaactgcccacttggcagtacatcaagtgtatcatatgccaagtacgccccctattgacgtcaatgacggtaaatggcccgcctggcattatgcccagtacatgaccttatgggactttcctacttggcagtacatctacgtattagtcatcgctattaccatggtgatgcggttttggcagtacatcaatgggcgtggatagcggtttgactcacggggatttccaagtctccaccccattgacgtcaatgggagtttgttttggcaccaaaatcaacgggactttccaaaatgtcgtaacaactccgccccattgacgcaaatgggcggtaggcgtgtacggtgggaggtctatataagcagagctggtttagtgaaccgtcagatccgctagagatccgcggccgctaatacgactcactatagggagagccgccaccatgaaacggacagccgacggaagcgagttcgagtcaccaaagaagaagcggaaagtcagttctgaggtggagttttcccacgagtactggatgagacatgccctgaccctggccaagagggcacgggatgagggggcgggtcctgtgggagccgtgctggtgctgaacaatagagtgatcggcgagggctggaacagagccatcggcctgcacgacccaacagcccatgccgaaattatggccctgagacagggcggcctggtcatgcagaactacagactgtttgacgccaccctgtacgtgacattcgagccttgcgtgatgtgcgccggcgccatgatcaactctaggatcggccgcgtggtgtttggcgtgaggaactcaaaaagaggcgccgcaggctccctgatgaacgtgctgaactaccccggcatgaatcaccgcgtcgaaattaccgagggaatcctggcagatgaatgtgccgccctgctgtgcgatttctatcggatgcctagacaggtgttcaattctcagaagaaggcccagagctccatcaactctggcggatctagcggaggatcctctggcagcgagacaccaggaacaagcgagtcagcaacaccagagagcagtggcggcagcagcggcggcagcgacaagaagtacagcatcggcctggccatcggcaccaactctgtgggctgggccgtgatcaccgacgagtacaaggtgcccagcaagaaattcaaggtgctgggcaacaccgaccggcacagcatcaagaagaacctgatcggagccctgctgttcgacagcggcgaaacagccgaggccacccggctgaagagaaccgccagaagaagatacaccagacggaagaaccggatctgctatctgcaagagatcttcagcaacgagatggccaaggtggacgacagcttcttccacagactggaagagtccttcctggtggaagaggataagaagcacgagcggcaccccatcttcggcaacatcgtggacgaggtggcctaccacgagaagtaccccaccatctaccacctgagaaagaaactggtggacagcaccgacaaggccgacctgcggctgatctatctggccctggcccacatgatcaagttccggggccacttcctgatcgagggcgacctgaaccccgacaacagcgacgtggacaagctgttcatccagctggtgcagacctacaaccagctgttcgaggaaaaccccatcaacgccagcggcgtggacgccaaggccatcctgtctgccagactgagcaagagcagacggctggaaaatctgatcgcccagctgcccggcgagaagaagaatggcctgttcggaaacctgattgccctgagcctgggcctgacccccaacttcaagagcaacttcgacctggccgaggatgccaaactgcagctgagcaaggacacctacgacgacgacctggacaacctgctggcccagatcggcgaccagtacgccgacctgtttctggccgccaagaacctgtccgacgccatcctgctgagcgacatcctgagagtgaacaccgagatcaccaaggcccccctgagcgcctctatgatcaagagatacgacgagcaccaccaggacctgaccctgctgaaagctctcgtgcggcagcagctgcctgagaagtacaaagagattttcttcgaccagagcaagaacggctacgccggctacattgacggcggagccagccaggaagagttctacaagttcatcaagcccatcctggaaaagatggacggcaccgaggaactgctcgtgaagctgaacagagaggacctgctgcggaagcagcggaccttcgacaacggcagcatcccccaccagatccacctgggagagctgcacgccattctgcggcggcaggaagatttttacccattcctgaaggacaaccgggaaaagatcgagaagatcctgaccttccgcatcccctactacgtgggccctctggccaggggaaacagcagattcgcctggatgaccagaaagagcgaggaaaccatcaccccctggaacttcgaggaagtggtggacaagggcgcttccgcccagagcttcatcgagcggatgaccaacttcgataagaacctgcccaacgagaaggtgctgcccaagcacagcctgctgtacgagtacttcaccgtgtataacgagctgaccaaagtgaaatacgtgaccgagggaatgagaaagcccgccttcctgagcggcgagcagaaaaaggccatcgtggacctgctgttcaagaccaaccggaaagtgaccgtgaagcagctgaaagaggactacttcaagaaaatcgagtgcttcgactccgtggaaatctccggcgtggaagatcggttcaacgcctccctgggcacataccacgatctgctgaaaattatcaaggacaaggacttcctggacaatgaggaaaacgaggacattctggaagatatcgtgctgaccctgacactgtttgaggacagagagatgatcgaggaacggctgaaaacctatgcccacctgttcgacgacaaagtgatgaagcagctgaagcggcggagatacaccggctggggcaggctgagccggaagctgatcaacggcatccgggacaagcagtccggcaagacaatcctggatttcctgaagtccgacggcttcgccaacagaaacttcatgcagctgatccacgacgacagcctgacctttaaagaggacatccagaaagcccaggtgtccggccagggcgatagcctgcacgagcacattgccaatctggccggcagccccgccattaagaagggcatcctgcagacagtgaaggtggtggacgagctcgtgaaagtgatgggccggcacaagcccgagaacatcgtgatcgaaatggccagagagaaccagaccacccagaagggacagaagaacagccgcgagagaatgaagcggatcgaagagggcatcaaagagctgggcagccagatcctgaaagaacaccccgtggaaaacacccagctgcagaacgagaagctgtacctgtactacctgcagaatgggcgggatatgtacgtggaccaggaactggacatcaaccggctgtccgactacgatgtggaccatatcgtgcctcagagctttctgaaggacgactccatcgacaacaaggtgctgaccagaagcgacaagaaccggggcaagagcgacaacgtgccctccgaagaggtcgtgaagaagatgaagaactactggcggcagctgctgaacgccaagctgattacccagagaaagttcgacaatctgaccaaggccgagagaggcggcctgagcgaactggataaggccggcttcatcaagagacagctggtggaaacccggcagatcacaaagcacgtggcacagatcctggactcccggatgaacactaagtacgacgagaatgacaagctgatccgggaagtgaaagtgatcaccctgaagtccaagctggtgtccgatttccggaaggatttccagttttacaaagtgcgcgagatcaacaactaccaccacgcccacgacgcctacctgaacgccgtcgtgggaaccgccctgatcaaaaagtaccctaagctggaaagcgagttcgtgtacggcgactacaaggtgtacgacgtgcggaagatgatcgccaagagcgagcaggaaatcggcaaggctaccgccaagtacttcttctacagcaacatcatgaactttttcaagaccgagattaccctggccaacggcgagatccggaagcggcctctgatcgagacaaacggcgaaaccggggagatcgtgtgggataagggccgggattttgccaccgtgcggaaagtgctgagcatgccccaagtgaatatcgtgaaaaagaccgaggtgcagacaggcggcttcagcaaagagtctatccggcccaagaggaacagcgataagctgatcgccagaaagaaggactgggaccctaagaagtacggcggcttcgtgagccccaccgtggcctattctgtgctggtggtggccaaagtggaaaagggcaagtccaagaaactgaagagtgtgaaagagctgctggggatcaccatcatggaaagaagcagcttcgagaagaatcccatcgactttctggaagccaagggctacaaagaagtgaaaaaggacctgatcatcaagctgcctaagtactccctgttcgagctggaaaacggccggaagagaatgctggcctctgcccggttcctgcagaagggaaacgaactggccctgccctccaaatatgtgaacttcctgtacctggccagccactatgagaagctgaagggctcccccgaggataatgagcagaaacagctgtttgtggaacagcacaagcactacctggacgagatcatcgagcagatcagcgagttctccaagagagtgatcctggccgacgctaatctggacaaagtgctgtccgcctacaacaagcaccgggataagcccatcagagagcaggccgagaatatcatccacctgtttaccctgaccaatctgggagcccctcgggccttcaagtactttgacaccaccatcgaccggaaggtgtaccggagcaccaaagaggtgctggacgccaccctgatccaccagagcatcaccggcctgtacgagacacggatcgacctgtctcagctgggaggtgacagcggcgggagcggcgggagcggggggagcactaatctgagcgacatcattgagaaggagactgggaaacagctggtcattcaggagtccatcctgatgctgcctgaggaggtggaggaagtgatcggcaacaagccagagtctgacatcctggtgcacaccgcctacgacgagtccacagatgagaatgtgatgctgctgacctctgacgcccccgagtataagccttgggccctggtcatccaggattctaacggcgagaataagatcaagatgctgagcggaggatccggaggatctggaggcagcaccaacctgtctgacatcatcgagaaggagacaggcaagcagctggtcatccaggagagcatcctgatgctgcccgaagaagtcgaagaagtgatcggaaacaagcctgagagcgatatcctggtccataccgcctacgacgagagtaccgacgaaaatgtgatgctgctgacatccgacgccccagagtataagccctgggctctggtcatccaggattccaacggagagaacaaaatcaaaatgctgtctggcggctcaaaaagaaccgccgacggcagcgaattcgagcccaagaagaagaggaaagtctaaccggtcatcatcaccatcaccattgagtttaaacccgctgatcagcctcgactgtgccttctagttgccagccatctgttgtttgcccctcccccgtgccttccttgaccctggaaggtgccactcccactgtcctttcctaataaaatgaggaaattgcatcgcattgtctgagtaggtgtcattctattctggggggtggggtggggcaggacagcaagggggaggattgggaagacaatagcaggcatgctggggatgcggtgggctctatggcttctgaggcggaaagaaccagctggggctcgataccgtcgacctctagctagagcttggcgtaatcatggtcatagctgtttcctgtgtgaaattgttatccgctcacaattccacacaacatacgagccggaagcataaagtgtaaagcctagggtgcctaatgagtgagctaactcacattaattgcgttgcgctcactgcccgctttccagtcgggaaacctgtcgtgccagctgcattaatgaatcggccaacgcgcggggagaggcggtttgcgtattgggcgcacttccgcttcctcgctcactgactcgctgcgctcggtcgttcggctgcggcgagcggtatcagctcactcaaaggcggtaatacggttatccacagaatcaggggataacgcaggaaagaacatgtgagcaaaaggccagcaaaaggccaggaaccgtaaaaaggccgcgttgctggcgtttttccataggctccgcccccctgacgagcatcacaaaaatcgacgctcaagtcagaggtggcgaaacccgacaggactataaagataccaggcgtttccccctggaagctccctcgtgcgctctcctgttccgaccctgccgcttaccggatacctgtccgcctttctcccttcgggaagcgtggcgctttctcatagctcacgctgtaggtatctcagttcggtgtaggtcgttcgctccaagctgggctgtgtgcacgaaccccccgttcagcccgaccgctgcgccttatccggtaactatcgtcttgagtccaacccggtaagacacgacttatcgccactggcagcagccactggtaacaggattagcagagcgaggtatgtaggcggtgctacagagttcttgaagtggtggcctaactacggctacactagaagaacagtatttggtatctgcgctctgctgaagccagttaccttcggaaaaagagttggtagctcttgatccggcaaacaaaccaccgctggtagcggtggtttttttgtttgcaagcagcagattacgcgcagaaaaaaaggatctcaagaagatcctttgatcttttctacggggtctgacactcagtggaacgaaaactcacgttaagggattttggtcatgagattatcaaaaaggatcttcacctagatccttttaaattaaaaatgaagttttaaatcaatctaaagtatatatgagtaaacttggtctgacagttaccaatgcttaatcagtgaggcacctatctcagcgatctgtctatttcgttcatccatagttgcctgactccccgtcgtgtagataactacgatacgggagggcttaccatctggccccagtgctgcaatgataccgcgggacccacgctcaccggctccagatttatcagcaataaaccagccagccggaagggccgagcgcagaagtggtcctgcaactttatccgcctccatccagtctattaattgttgccgggaagctagagtaagtagttcgccagttaatagtttgcgcaacgttgttgccattgctacaggcatcgtggtgtcacgctcgtcgtttggtatggcttcattcagctccggttcccaacgatcaaggcgagttacatgatcccccatgttgtgcaaaaaagcggttagctccttcggtcctccgatcgttgtcagaagtaagttggccgcagtgttatcactcatggttatggcagcactgcataattctcttactgtcatgccatccgtaagatgcttttctgtgactggtgagtactcaaccaagtcattctgagaatagtgtatgcggcgaccgagttgctcttgcccggcgtcaatacgggataataccgcgccacatagcagaactttaaaagtgctcatcattggaaaacgttcttcggggcgaaaactctcaaggatcttaccgctgttgagatccagttcgatgtaacccactcgtgcacccaactgatcttcagcatcttttactttcaccagcgtttctgggtgagcaaaaacaggaaggcaaaatgccgcaaaaaagggaataagggcgacacggaaatgttgaatactcatactcttcctttttcaatattattgaagcatttatcagggttattgtctcatgagcggatacatatttgaatgtatttagaaaaataaacaaataggggttccgcgcacatttccccgaaaagtgccacctgacgtcgacggatcgggagatcgatctcccgatcccctagggtcgactctcagtacaatctgctctgatgccgcatagttaagccagtatctgctccctgcttgtgtgttggaggtcgctgagtagtgcgcgagcaaaatttaagctacaacaaggcaaggcttgaccgacaattgcatgaagaatctgcttagggttaggcgttttgcgctgcttcgcgatgtacgggccagatatacgcgttgacattgattattgac

SEQ ID NO: 553 - protein, 1853 aa, synthetic construct
MKRTADGSEFESPKKKRKVSSETGPVAVDPTLRRRIEPHEFEVFFDPRELRKETCLLYEINWGGRHSIWRHTSQNTNKHVEVNFIEKFTTERYFCPNTRCSITWFLSWSPCGECSRAITEFLSRYPHVTLFIYIARLYHHADPRNRQGLRDLISSGVTIQIMTEQESGYCWRNFVNYSPSNEAHWPRYPHLWVRLYVLELYCIILGLPPCLNILRRKQPQLTFFTIALQSCHYQRLPPHILWATGLKSGGSSGGSSGSETPGTSESATPESSGGSSGGSDKKYSIGLAIGTNSVGWAVITDEYKVPSKKFKVLGNTDRHSIKKNLIGALLFDSGETAEATRLKRTARRRYTRRKNRICYLQEIFSNEMAKVDDSFFHRLEESFLVEEDKKHERHPIFGNIVDEVAYHEKYPTIYHLRKKLVDSTDKADLRLIYLALAHMIKFRGHFLIEGDLNPDNSDVDKLFIQLVQTYNQLFEENPINASGVDAKAILSARLSKSRRLENLIAQLPGEKKNGLFGNLIALSLGLTPNFKSNFDLAEDAKLQLSKDTYDDDLDNLLAQIGDQYADLFLAAKNLSDAILLSDILRVNTEITKAPLSASMIKRYDEHHQDLTLLKALVRQQLPEKYKEIFFDQSKNGYAGYIDGGASQEEFYKFIKPILEKMDGTEELLVKLNREDLLRKQRTFDNGSIPHQIHLGELHAILRRQEDFYPFLKDNREKIEKILTFRIPYYVGPLARGNSRFAWMTRKSEETITPWNFEEVVDKGASAQSFIERMTNFDKNLPNEKVLPKHSLLYEYFTVYNELTKVKYVTEGMRKPAFLSGEQKKAIVDLLFKTNRKVTVKQLKEDYFKKIECFDSVEISGVEDRFNASLGTYHDLLKIIKDKDFLDNEENEDILEDIVLTLTLFEDREMIEERLKTYAHLFDDKVMKQLKRRRYTGWGRLSRKLINGIRDKQSGKTILDFLKSDGFANRNFMQLIHDDSLTFKEDIQKAQVSGQGDSLHEHIANLAGSPAIKKGILQTVKVVDELVKVMGRHKPENIVIEMARENQTTQKGQKNSRERMKRIEEGIKELGSQILKEHPVENTQLQNEKLYLYYLQNGRDMYVDQELDINRLSDYDVDHIVPQSFLKDDSIDNKVLTRSDKNRGKSDNVPSEEVVKKMKNYWRQLLNAKLITQRKFDNLTKAERGGLSELDKAGFIKRQLVETRQITKHVAQILDSRMNTKYDENDKLIREVKVITLKSKLVSDFRKDFQFYKVREINNYHHAHDAYLNAVVGTALIKKYPKLESEFVYGDYKVYDVRKMIAKSEQEIGKATAKYFFYSNIMNFFKTEITLANGEIRKRPLIETNGETGEIVWDKGRDFATVRKVLSMPQVNIVKKTEVQTGGFSKESILPKRNSDKLIARKKDWDPKKYGGFDSPTVAYSVLVVAKVEKGKSKKLKSVKELLGITIMERSSFEKNPIDFLEAKGYKEVKKDLIIKLPKYSLFELENGRKRMLASAGELQKGNELALPSKYVNFLYLASHYEKLKGSPEDNEQKQLFVEQHKHYLDEIIEQISEFSKRVILADANLDKVLSAYNKHRDKPIREQAENIIHLFTLTNLGAPAAFKYFDTTIDRKRYTSTKEVLDATLIHQSITGLYETRIDLSQLGGDSGGSGGSGGSTNLSDIIEKETGKQLVIQESILMLPEEVEEVIGNKPESDILVHTAYDESTDENVMLLTSDAPEYKPWALVIQDSNGENKIKMLSGGSGGSGGSTNLSDIIEKETGKQLVIQESILMLPEEVEEVIGNKPESDILVHTAYDESTDENVMLLTSDAPEYKPWALVIQDSNGENKIKMLSGGSKRTADGSEFEPKKKRKV

SEQ ID NO: 554 - protein, 1853 aa, synthetic construct
MKRTADGSEFESPKKKRKVSSETGPVAVDPTLRRRIEPHEFEVFFDPRELRKETCLLYEINWGGRHSIWRHTSQNTNKHVEVNFIEKFTTERYFCPNTRCSITWFLSYSPCGECSRAITEFLSRYPHVTLFIYIARLYHHADPENRQGLRDLISSGVTIQIMTEQESGYCWRNFVNYSPSNEAHWPRYPHLWVRLYVLELYCIILGLPPCLNILRRKQPQLTFFTIALQSCHYQRLPPHILWATGLKSGGSSGGSSGSETPGTSESATPESSGGSSGGSDKKYSIGLAIGTNSVGWAVITDEYKVPSKKFKVLGNTDRHSIKKNLIGALLFDSGETAEATRLKRTARRRYTRRKNRICYLQEIFSNEMAKVDDSFFHRLEESFLVEEDKKHERHPIFGNIVDEVAYHEKYPTIYHLRKKLVDSTDKADLRLIYLALAHMIKFRGHFLIEGDLNPDNSDVDKLFIQLVQTYNQLFEENPINASGVDAKAILSARLSKSRRLENLIAQLPGEKKNGLFGNLIALSLGLTPNFKSNFDLAEDAKLQLSKDTYDDDLDNLLAQIGDQYADLFLAAKNLSDAILLSDILRVNTEITKAPLSASMIKRYDEHHQDLTLLKALVRQQLPEKYKEIFFDQSKNGYAGYIDGGASQEEFYKFIKPILEKMDGTEELLVKLNREDLLRKQRTFDNGSIPHQIHLGELHAILRRQEDFYPFLKDNREKIEKILTFRIPYYVGPLARGNSRFAWMTRKSEETITPWNFEEVVDKGASAQSFIERMTNFDKNLPNEKVLPKHSLLYEYFTVYNELTKVKYVTEGMRKPAFLSGEQKKAIVDLLFKTNRKVTVKQLKEDYFKKIECFDSVEISGVEDRFNASLGTYHDLLKIIKDKDFLDNEENEDILEDIVLTLTLFEDREMIEERLKTYAHLFDDKVMKQLKRRRYTGWGRLSRKLINGIRDKQSGKTILDFLKSDGFANRNFMQLIHDDSLTFKEDIQKAQVSGQGDSLHEHIANLAGSPAIKKGILQTVKVVDELVKVMGRHKPENIVIEMARENQTTQKGQKNSRERMKRIEEGIKELGSQILKEHPVENTQLQNEKLYLYYLQNGRDMYVDQELDINRLSDYDVDHIVPQSFLKDDSIDNKVLTRSDKNRGKSDNVPSEEVVKKMKNYWRQLLNAKLITQRKFDNLTKAERGGLSELDKAGFIKRQLVETRQITKHVAQILDSRMNTKYDENDKLIREVKVITLKSKLVSDFRKDFQFYKVREINNYHHAHDAYLNAVVGTALIKKYPKLESEFVYGDYKVYDVRKMIAKSEQEIGKATAKYFFYSNIMNFFKTEITLANGEIRKRPLIETNGETGEIVWDKGRDFATVRKVLSMPQVNIVKKTEVQTGGFSKESILPKRNSDKLIARKKDWDPKKYGGFDSPTVAYSVLVVAKVEKGKSKKLKSVKELLGITIMERSSFEKNPIDFLEAKGYKEVKKDLIIKLPKYSLFELENGRKRMLASAGELQKGNELALPSKYVNFLYLASHYEKLKGSPEDNEQKQLFVEQHKHYLDEIIEQISEFSKRVILADANLDKVLSAYNKHRDKPIREQAENIIHLFTLTNLGAPAAFKYFDTTIDRKRYTSTKEVLDATLIHQSITGLYETRIDLSQLGGDSGGSGGSGGSTNLSDIIEKETGKQLVIQESILMLPEEVEEVIGNKPESDILVHTAYDESTDENVMLLTSDAPEYKPWALVIQDSNGENKIKMLSGGSGGSGGSTNLSDIIEKETGKQLVIQESILMLPEEVEEVIGNKPESDILVHTAYDESTDENVMLLTSDAPEYKPWALVIQDSNGENKIKMLSGGSKRTADGSEFEPKKKRKV

SEQ ID NO: 555 - protein, 1853 aa, synthetic construct
MKRTADGSEFESPKKKRKVSSETGPVAVDPTLRRRIEPHEFEVFFDPRELRKETCLLYEINWGGRHSIWRHTSQNTNKHVEVNFIEKFTTERYFCPNTRCSITWFLSYSPCGECSRAITEFLSRYPHVTLFIYIARLYHHADPRNRQGLEDLISSGVTIQIMTEQESGYCWRNFVNYSPSNEAHWPRYPHLWVRLYVLELYCIILGLPPCLNILRRKQPQLTFFTIALQSCHYQRLPPHILWATGLKSGGSSGGSSGSETPGTSESATPESSGGSSGGSDKKYSIGLAIGTNSVGWAVITDEYKVPSKKFKVLGNTDRHSIKKNLIGALLFDSGETAEATRLKRTARRRYTRRKNRICYLQEIFSNEMAKVDDSFFHRLEESFLVEEDKKHERHPIFGNIVDEVAYHEKYPTIYHLRKKLVDSTDKADLRLIYLALAHMIKFRGHFLIEGDLNPDNSDVDKLFIQLVQTYNQLFEENPINASGVDAKAILSARLSKSRRLENLIAQLPGEKKNGLFGNLIALSLGLTPNFKSNFDLAEDAKLQLSKDTYDDDLDNLLAQIGDQYADLFLAAKNLSDAILLSDILRVNTEITKAPLSASMIKRYDEHHQDLTLLKALVRQQLPEKYKEIFFDQSKNGYAGYIDGGASQEEFYKFIKPILEKMDGTEELLVKLNREDLLRKQRTFDNGSIPHQIHLGELHAILRRQEDFYPFLKDNREKIEKILTFRIPYYVGPLARGNSRFAWMTRKSEETITPWNFEEVVDKGASAQSFIERMTNFDKNLPNEKVLPKHSLLYEYFTVYNELTKVKYVTEGMRKPAFLSGEQKKAIVDLLFKTNRKVTVKQLKEDYFKKIECFDSVEISGVEDRFNASLGTYHDLLKIIKDKDFLDNEENEDILEDIVLTLTLFEDREMIEERLKTYAHLFDDKVMKQLKRRRYTGWGRLSRKLINGIRDKQSGKTILDFLKSDGFANRNFMQLIHDDSLTFKEDIQKAQVSGQGDSLHEHIANLAGSPAIKKGILQTVKVVDELVKVMGRHKPENIVIEMARENQTTQKGQKNSRERMKRIEEGIKELGSQILKEHPVENTQLQNEKLYLYYLQNGRDMYVDQELDINRLSDYDVDHIVPQSFLKDDSIDNKVLTRSDKNRGKSDNVPSEEVVKKMKNYWRQLLNAKLITQRKFDNLTKAERGGLSELDKAGFIKRQLVETRQITKHVAQILDSRMNTKYDENDKLIREVKVITLKSKLVSDFRKDFQFYKVREINNYHHAHDAYLNAVVGTALIKKYPKLESEFVYGDYKVYDVRKMIAKSEQEIGKATAKYFFYSNIMNFFKTEITLANGEIRKRPLIETNGETGEIVWDKGRDFATVRKVLSMPQVNIVKKTEVQTGGFSKESILPKRNSDKLIARKKDWDPKKYGGFDSPTVAYSVLVVAKVEKGKSKKLKSVKELLGITIMERSSFEKNPIDFLEAKGYKEVKKDLIIKLPKYSLFELENGRKRMLASAGELQKGNELALPSKYVNFLYLASHYEKLKGSPEDNEQKQLFVEQHKHYLDEIIEQISEFSKRVILADANLDKVLSAYNKHRDKPIREQAENIIHLFTLTNLGAPAAFKYFDTTIDRKRYTSTKEVLDATLIHQSITGLYETRIDLSQLGGDSGGSGGSGGSTNLSDIIEKETGKQLVIQESILMLPEEVEEVIGNKPESDILVHTAYDESTDENVMLLTSDAPEYKPWALVIQDSNGENKIKMLSGGSGGSGGSTNLSDIIEKETGKQLVIQESILMLPEEVEEVIGNKPESDILVHTAYDESTDENVMLLTSDAPEYKPWALVIQDSNGENKIKMLSGGSKRTADGSEFEPKKKRKV

SEQ ID NO: 556 - protein, 1853 aa, synthetic construct
MKRTADGSEFESPKKKRKVSSETGPVAVDPTLRRRIEPHEFEVFFDPRELRKETCLLYEINWGGRHSIWRHTSQNTNKHVEVNFIEKFTTERYFCPNTRCSITWFLSYSPCGECSRAITEFLSRYPHVTLFIYIARLYHHADPENRQGLEDLISSGVTIQIMTEQESGYCWRNFVNYSPSNEAHWPRYPHLWVRLYVLELYCIILGLPPCLNILRRKQPQLTFFTIALQSCHYQRLPPHILWATGLKSGGSSGGSSGSETPGTSESATPESSGGSSGGSDKKYSIGLAIGTNSVGWAVITDEYKVPSKKFKVLGNTDRHSIKKNLIGALLFDSGETAEATRLKRTARRRYTRRKNRICYLQEIFSNEMAKVDDSFFHRLEESFLVEEDKKHERHPIFGNIVDEVAYHEKYPTIYHLRKKLVDSTDKADLRLIYLALAHMIKFRGHFLIEGDLNPDNSDVDKLFIQLVQTYNQLFEENPINASGVDAKAILSARLSKSRRLENLIAQLPGEKKNGLFGNLIALSLGLTPNFKSNFDLAEDAKLQLSKDTYDDDLDNLLAQIGDQYADLFLAAKNLSDAILLSDILRVNTEITKAPLSASMIKRYDEHHQDLTLLKALVRQQLPEKYKEIFFDQSKNGYAGYIDGGASQEEFYKFIKPILEKMDGTEELLVKLNREDLLRKQRTFDNGSIPHQIHLGELHAILRRQEDFYPFLKDNREKIEKILTFRIPYYVGPLARGNSRFAWMTRKSEETITPWNFEEVVDKGASAQSFIERMTNFDKNLPNEKVLPKHSLLYEYFTVYNELTKVKYVTEGMRKPAFLSGEQKKAIVDLLFKTNRKVTVKQLKEDYFKKIECFDSVEISGVEDRFNASLGTYHDLLKIIKDKDFLDNEENEDILEDIVLTLTLFEDREMIEERLKTYAHLFDDKVMKQLKRRRYTGWGRLSRKLINGIRDKQSGKTILDFLKSDGFANRNFMQLIHDDSLTFKEDIQKAQVSGQGDSLHEHIANLAGSPAIKKGILQTVKVVDELVKVMGRHKPENIVIEMARENQTTQKGQKNSRERMKRIEEGIKELGSQILKEHPVENTQLQNEKLYLYYLQNGRDMYVDQELDINRLSDYDVDHIVPQSFLKDDSIDNKVLTRSDKNRGKSDNVPSEEVVKKMKNYWRQLLNAKLITQRKFDNLTKAERGGLSELDKAGFIKRQLVETRQITKHVAQILDSRMNTKYDENDKLIREVKVITLKSKLVSDFRKDFQFYKVREINNYHHAHDAYLNAVVGTALIKKYPKLESEFVYGDYKVYDVRKMIAKSEQEIGKATAKYFFYSNIMNFFKTEITLANGEIRKRPLIETNGETGEIVWDKGRDFATVRKVLSMPQVNIVKKTEVQTGGFSKESILPKRNSDKLIARKKDWDPKKYGGFDSPTVAYSVLVVAKVEKGKSKKLKSVKELLGITIMERSSFEKNPIDFLEAKGYKEVKKDLIIKLPKYSLFELENGRKRMLASAGELQKGNELALPSKYVNFLYLASHYEKLKGSPEDNEQKQLFVEQHKHYLDEIIEQISEFSKRVILADANLDKVLSAYNKHRDKPIREQAENIIHLFTLTNLGAPAAFKYFDTTIDRKRYTSTKEVLDATLIHQSITGLYETRIDLSQLGGDSGGSGGSGGSTNLSDIIEKETGKQLVIQESILMLPEEVEEVIGNKPESDILVHTAYDESTDENVMLLTSDAPEYKPWALVIQDSNGENKIKMLSGGSGGSGGSTNLSDIIEKETGKQLVIQESILMLPEEVEEVIGNKPESDILVHTAYDESTDENVMLLTSDAPEYKPWALVIQDSNGENKIKMLSGGSKRTADGSEFEPKKKRKV

SEQ ID NO: 557 - protein, 1853 aa, synthetic construct
MKRTADGSEFESPKKKRKVSSETGPVAVDPTLRRRIEPHEFEVFFDPRELRKETCLLYEINWGGRHSIWRHTSQNTNKHVEVNFIEKFTTERYFCPNTRCSITWFLSWSPCGECSRAITEFLSRYPHVTLFIYIARLYHHADPENRQGLEDLISSGVTIQIMTEQESGYCWRNFVNYSPSNEAHWPRYPHLWVRLYVLELYCIILGLPPCLNILRRKQPQLTFFTIALQSCHYQRLPPHILWATGLKSGGSSGGSSGSETPGTSESATPESSGGSSGGSDKKYSIGLAIGTNSVGWAVITDEYKVPSKKFKVLGNTDRHSIKKNLIGALLFDSGETAEATRLKRTARRRYTRRKNRICYLQEIFSNEMAKVDDSFFHRLEESFLVEEDKKHERHPIFGNIVDEVAYHEKYPTIYHLRKKLVDSTDKADLRLIYLALAHMIKFRGHFLIEGDLNPDNSDVDKLFIQLVQTYNQLFEENPINASGVDAKAILSARLSKSRRLENLIAQLPGEKKNGLFGNLIALSLGLTPNFKSNFDLAEDAKLQLSKDTYDDDLDNLLAQIGDQYADLFLAAKNLSDAILLSDILRVNTEITKAPLSASMIKRYDEHHQDLTLLKALVRQQLPEKYKEIFFDQSKNGYAGYIDGGASQEEFYKFIKPILEKMDGTEELLVKLNREDLLRKQRTFDNGSIPHQIHLGELHAILRRQEDFYPFLKDNREKIEKILTFRIPYYVGPLARGNSRFAWMTRKSEETITPWNFEEVVDKGASAQSFIERMTNFDKNLPNEKVLPKHSLLYEYFTVYNELTKVKYVTEGMRKPAFLSGEQKKAIVDLLFKTNRKVTVKQLKEDYFKKIECFDSVEISGVEDRFNASLGTYHDLLKIIKDKDFLDNEENEDILEDIVLTLTLFEDREMIEERLKTYAHLFDDKVMKQLKRRRYTGWGRLSRKLINGIRDKQSGKTILDFLKSDGFANRNFMQLIHDDSLTFKEDIQKAQVSGQGDSLHEHIANLAGSPAIKKGILQTVKVVDELVKVMGRHKPENIVIEMARENQTTQKGQKNSRERMKRIEEGIKELGSQILKEHPVENTQLQNEKLYLYYLQNGRDMYVDQELDINRLSDYDVDHIVPQSFLKDDSIDNKVLTRSDKNRGKSDNVPSEEVVKKMKNYWRQLLNAKLITQRKFDNLTKAERGGLSELDKAGFIKRQLVETRQITKHVAQILDSRMNTKYDENDKLIREVKVITLKSKLVSDFRKDFQFYKVREINNYHHAHDAYLNAVVGTALIKKYPKLESEFVYGDYKVYDVRKMIAKSEQEIGKATAKYFFYSNIMNFFKTEITLANGEIRKRPLIETNGETGEIVWDKGRDFATVRKVLSMPQVNIVKKTEVQTGGFSKESILPKRNSDKLIARKKDWDPKKYGGFDSPTVAYSVLVVAKVEKGKSKKLKSVKELLGITIMERSSFEKNPIDFLEAKGYKEVKKDLIIKLPKYSLFELENGRKRMLASAGELQKGNELALPSKYVNFLYLASHYEKLKGSPEDNEQKQLFVEQHKHYLDEIIEQISEFSKRVILADANLDKVLSAYNKHRDKPIREQAENIIHLFTLTNLGAPAAFKYFDTTIDRKRYTSTKEVLDATLIHQSITGLYETRIDLSQLGGDSGGSGGSGGSTNLSDIIEKETGKQLVIQESILMLPEEVEEVIGNKPESDILVHTAYDESTDENVMLLTSDAPEYKPWALVIQDSNGENKIKMLSGGSGGSGGSTNLSDIIEKETGKQLVIQESILMLPEEVEEVIGNKPESDILVHTAYDESTDENVMLLTSDAPEYKPWALVIQDSNGENKIKMLSGGSKRTADGSEFEPKKKRKV

SEQ ID NO: 558 - protein, 1853 aa, synthetic construct
MKRTADGSEFESPKKKRKVSSETGPVAVDPTLRRRIEPHEFEVFFDPRELAKETCLLYEINWGGRHSIWRHTSQNTNKHVEVNFIEKFTTERYFCPNTRCSITWFLSWSPCGECSRAITEFLSRYPHVTLFIYIARLYHHADPRNRQGLRDLISSGVTIQIMTEQESGYCWRNFVNYSPSNEAHWPRYPHLWVRLYVLELYCIILGLPPCLNILRRKQPQLTFFTIALQSCHYQRLPPHILWATGLKSGGSSGGSSGSETPGTSESATPESSGGSSGGSDKKYSIGLAIGTNSVGWAVITDEYKVPSKKFKVLGNTDRHSIKKNLIGALLFDSGETAEATRLKRTARRRYTRRKNRICYLQEIFSNEMAKVDDSFFHRLEESFLVEEDKKHERHPIFGNIVDEVAYHEKYPTIYHLRKKLVDSTDKADLRLIYLALAHMIKFRGHFLIEGDLNPDNSDVDKLFIQLVQTYNQLFEENPINASGVDAKAILSARLSKSRRLENLIAQLPGEKKNGLFGNLIALSLGLTPNFKSNFDLAEDAKLQLSKDTYDDDLDNLLAQIGDQYADLFLAAKNLSDAILLSDILRVNTEITKAPLSASMIKRYDEHHQDLTLLKALVRQQLPEKYKEIFFDQSKNGYAGYIDGGASQEEFYKFIKPILEKMDGTEELLVKLNREDLLRKQRTFDNGSIPHQIHLGELHAILRRQEDFYPFLKDNREKIEKILTFRIPYYVGPLARGNSRFAWMTRKSEETITPWNFEEVVDKGASAQSFIERMTNFDKNLPNEKVLPKHSLLYEYFTVYNELTKVKYVTEGMRKPAFLSGEQKKAIVDLLFKTNRKVTVKQLKEDYFKKIECFDSVEISGVEDRFNASLGTYHDLLKIIKDKDFLDNEENEDILEDIVLTLTLFEDREMIEERLKTYAHLFDDKVMKQLKRRRYTGWGRLSRKLINGIRDKQSGKTILDFLKSDGFANRNFMQLIHDDSLTFKEDIQKAQVSGQGDSLHEHIANLAGSPAIKKGILQTVKVVDELVKVMGRHKPENIVIEMARENQTTQKGQKNSRERMKRIEEGIKELGSQILKEHPVENTQLQNEKLYLYYLQNGRDMYVDQELDINRLSDYDVDHIVPQSFLKDDSIDNKVLTRSDKNRGKSDNVPSEEVVKKMKNYWRQLLNAKLITQRKFDNLTKAERGGLSELDKAGFIKRQLVETRQITKHVAQILDSRMNTKYDENDKLIREVKVITLKSKLVSDFRKDFQFYKVREINNYHHAHDAYLNAVVGTALIKKYPKLESEFVYGDYKVYDVRKMIAKSEQEIGKATAKYFFYSNIMNFFKTEITLANGEIRKRPLIETNGETGEIVWDKGRDFATVRKVLSMPQVNIVKKTEVQTGGFSKESILPKRNSDKLIARKKDWDPKKYGGFDSPTVAYSVLVVAKVEKGKSKKLKSVKELLGITIMERSSFEKNPIDFLEAKGYKEVKKDLIIKLPKYSLFELENGRKRMLASAGELQKGNELALPSKYVNFLYLASHYEKLKGSPEDNEQKQLFVEQHKHYLDEIIEQISEFSKRVILADANLDKVLSAYNKHRDKPIREQAENIIHLFTLTNLGAPAAFKYFDTTIDRKRYTSTKEVLDATLIHQSITGLYETRIDLSQLGGDSGGSGGSGGSTNLSDIIEKETGKQLVIQESILMLPEEVEEVIGNKPESDILVHTAYDESTDENVMLLTSDAPEYKPWALVIQDSNGENKIKMLSGGSGGSGGSTNLSDIIEKETGKQLVIQESILMLPEEVEEVIGNKPESDILVHTAYDESTDENVMLLTSDAPEYKPWALVIQDSNGENKIKMLSGGSKRTADGSEFEPKKKRKV

SEQ ID NO: 559 - protein, 1853 aa, synthetic construct
MKRTADGSEFESPKKKRKVSSETGPVAVDPTLRRRIEPHEFEVFFDPRELAAETCLLYEINWGGRHSIWRHTSQNTNKHVEVNFIEKFTTERYFCPNTRCSITWFLSWSPCGECSRAITEFLSRYPHVTLFIYIARLYHHADPRNRQGLRDLISSGVTIQIMTEQESGYCWRNFVNYSPSNEAHWPRYPHLWVRLYVLELYCIILGLPPCLNILRRKQPQLTFFTIALQSCHYQRLPPHILWATGLKSGGSSGGSSGSETPGTSESATPESSGGSSGGSDKKYSIGLAIGTNSVGWAVITDEYKVPSKKFKVLGNTDRHSIKKNLIGALLFDSGETAEATRLKRTARRRYTRRKNRICYLQEIFSNEMAKVDDSFFHRLEESFLVEEDKKHERHPIFGNIVDEVAYHEKYPTIYHLRKKLVDSTDKADLRLIYLALAHMIKFRGHFLIEGDLNPDNSDVDKLFIQLVQTYNQLFEENPINASGVDAKAILSARLSKSRRLENLIAQLPGEKKNGLFGNLIALSLGLTPNFKSNFDLAEDAKLQLSKDTYDDDLDNLLAQIGDQYADLFLAAKNLSDAILLSDILRVNTEITKAPLSASMIKRYDEHHQDLTLLKALVRQQLPEKYKEIFFDQSKNGYAGYIDGGASQEEFYKFIKPILEKMDGTEELLVKLNREDLLRKQRTFDNGSIPHQIHLGELHAILRRQEDFYPFLKDNREKIEKILTFRIPYYVGPLARGNSRFAWMTRKSEETITPWNFEEVVDKGASAQSFIERMTNFDKNLPNEKVLPKHSLLYEYFTVYNELTKVKYVTEGMRKPAFLSGEQKKAIVDLLFKTNRKVTVKQLKEDYFKKIECFDSVEISGVEDRFNASLGTYHDLLKIIKDKDFLDNEENEDILEDIVLTLTLFEDREMIEERLKTYAHLFDDKVMKQLKRRRYTGWGRLSRKLINGIRDKQSGKTILDFLKSDGFANRNFMQLIHDDSLTFKEDIQKAQVSGQGDSLHEHIANLAGSPAIKKGILQTVKVVDELVKVMGRHKPENIVIEMARENQTTQKGQKNSRERMKRIEEGIKELGSQILKEHPVENTQLQNEKLYLYYLQNGRDMYVDQELDINRLSDYDVDHIVPQSFLKDDSIDNKVLTRSDKNRGKSDNVPSEEVVKKMKNYWRQLLNAKLITQRKFDNLTKAERGGLSELDKAGFIKRQLVETRQITKHVAQILDSRMNTKYDENDKLIREVKVITLKSKLVSDFRKDFQFYKVREINNYHHAHDAYLNAVVGTALIKKYPKLESEFVYGDYKVYDVRKMIAKSEQEIGKATAKYFFYSNIMNFFKTEITLANGEIRKRPLIETNGETGEIVWDKGRDFATVRKVLSMPQVNIVKKTEVQTGGFSKESILPKRNSDKLIARKKDWDPKKYGGFDSPTVAYSVLVVAKVEKGKSKKLKSVKELLGITIMERSSFEKNPIDFLEAKGYKEVKKDLIIKLPKYSLFELENGRKRMLASAGELQKGNELALPSKYVNFLYLASHYEKLKGSPEDNEQKQLFVEQHKHYLDEIIEQISEFSKRVILADANLDKVLSAYNKHRDKPIREQAENIIHLFTLTNLGAPAAFKYFDTTIDRKRYTSTKEVLDATLIHQSITGLYETRIDLSQLGGDSGGSGGSGGSTNLSDIIEKETGKQLVIQESILMLPEEVEEVIGNKPESDILVHTAYDESTDENVMLLTSDAPEYKPWALVIQDSNGENKIKMLSGGSGGSGGSTNLSDIIEKETGKQLVIQESILMLPEEVEEVIGNKPESDILVHTAYDESTDENVMLLTSDAPEYKPWALVIQDSNGENKIKMLSGGSKRTADGSEFEPKKKRKV

SEQ ID NO: 560 - protein, 1824 aa, synthetic construct
MKRTADGSEFESPKKKRKVSEASPASGPRHLMDPHIFTSNFNNGIGRHKTYLCYEVERLDNGTSVKMDQHRGFLHNQAKNLLCGFYGRHAELRFLDLVPSLQLDPAQIYRVTWFISWSPCFSWGCAGEVRAFLQENTHVRLRIFAARIYDYDPLYKEALQMLRDAGAQVSIMTYDEFKHCWDTFVDHQGCPFQPWDGLDEHSQALSGRLRAILQNQGNSGGSSGGSSGSETPGTSESATPESSGGSSGGSDKKYSIGLAIGTNSVGWAVITDEYKVPSKKFKVLGNTDRHSIKKNLIGALLFDSGETAEATRLKRTARRRYTRRKNRICYLQEIFSNEMAKVDDSFFHRLEESFLVEEDKKHERHPIFGNIVDEVAYHEKYPTIYHLRKKLVDSTDKADLRLIYLALAHMIKFRGHFLIEGDLNPDNSDVDKLFIQLVQTYNQLFEENPINASGVDAKAILSARLSKSRRLENLIAQLPGEKKNGLFGNLIALSLGLTPNFKSNFDLAEDAKLQLSKDTYDDDLDNLLAQIGDQYADLFLAAKNLSDAILLSDILRVNTEITKAPLSASMIKRYDEHHQDLTLLKALVRQQLPEKYKEIFFDQSKNGYAGYIDGGASQEEFYKFIKPILEKMDGTEELLVKLNREDLLRKQRTFDNGSIPHQIHLGELHAILRRQEDFYPFLKDNREKIEKILTFRIPYYVGPLARGNSRFAWMTRKSEETITPWNFEEVVDKGASAQSFIERMTNFDKNLPNEKVLPKHSLLYEYFTVYNELTKVKYVTEGMRKPAFLSGEQKKAIVDLLFKTNRKVTVKQLKEDYFKKIECFDSVEISGVEDRFNASLGTYHDLLKIIKDKDFLDNEENEDILEDIVLTLTLFEDREMIEERLKTYAHLFDDKVMKQLKRRRYTGWGRLSRKLINGIRDKQSGKTILDFLKSDGFANRNFMQLIHDDSLTFKEDIQKAQVSGQGDSLHEHIANLAGSPAIKKGILQTVKVVDELVKVMGRHKPENIVIEMARENQTTQKGQKNSRERMKRIEEGIKELGSQILKEHPVENTQLQNEKLYLYYLQNGRDMYVDQELDINRLSDYDVDHIVPQSFLKDDSIDNKVLTRSDKNRGKSDNVPSEEVVKKMKNYWRQLLNAKLITQRKFDNLTKAERGGLSELDKAGFIKRQLVETRQITKHVAQILDSRMNTKYDENDKLIREVKVITLKSKLVSDFRKDFQFYKVREINNYHHAHDAYLNAVVGTALIKKYPKLESEFVYGDYKVYDVRKMIAKSEQEIGKATAKYFFYSNIMNFFKTEITLANGEIRKRPLIETNGETGEIVWDKGRDFATVRKVLSMPQVNIVKKTEVQTGGFSKESILPKRNSDKLIARKKDWDPKKYGGFDSPTVAYSVLVVAKVEKGKSKKLKSVKELLGITIMERSSFEKNPIDFLEAKGYKEVKKDLIIKLPKYSLFELENGRKRMLASAGELQKGNELALPSKYVNFLYLASHYEKLKGSPEDNEQKQLFVEQHKHYLDEIIEQISEFSKRVILADANLDKVLSAYNKHRDKPIREQAENIIHLFTLTNLGAPAAFKYFDTTIDRKRYTSTKEVLDATLIHQSITGLYETRIDLSQLGGDSGGSGGSGGSTNLSDIIEKETGKQLVIQESILMLPEEVEEVIGNKPESDILVHTAYDESTDENVMLLTSDAPEYKPWALVIQDSNGENKIKMLSGGSGGSGGSTNLSDIIEKETGKQLVIQESILMLPEEVEEVIGNKPESDILVHTAYDESTDENVMLLTSDAPEYKPWALVIQDSNGENKIKMLSGGSKRTADGSEFEPKKKRKV

SEQ ID NO: 561 - protein, 2006 aa, synthetic construct
MKRTADGSEFESPKKKRKVNPQIRNPMERMYRDTFYDNFENEPILYGRSYTWLCYEVKIKRGRSNLLWDTGVFRGQVYFKPQYHAEMCFLSWFCGNQLPAYKCFQITWFVSWTPCPDCVAKLAEFLSEHPNVTLTISAARLYYYWERDYRRALCRLSQAGARVTIMDYEEFAYCWENFVYNEGQQFMPWYKFDENYAFLHRTLKEILRYLMDPDTFTFNFNNDPLVLRRRQTYLCYEVERLDNGTWVLMDQHMGFLCNEAKNLLCGFYGRHAELRFLDLVPSLQLDPAQIYRVTWFISWSPCFSWGCAGEVRAFLQENTHVRLRIFAARIYDYDPLYKEALQMLRDAGAQVSIMTYDEFEYCWDTFVYRQGCPFQPWDGLEEHSQALSGRLRAILQNQGNSGGSSGGSSGSETPGTSESATPESSGGSSGGSDKKYSIGLAIGTNSVGWAVITDEYKVPSKKFKVLGNTDRHSIKKNLIGALLFDSGETAEATRLKRTARRRYTRRKNRICYLQEIFSNEMAKVDDSFFHRLEESFLVEEDKKHERHPIFGNIVDEVAYHEKYPTIYHLRKKLVDSTDKADLRLIYLALAHMIKFRGHFLIEGDLNPDNSDVDKLFIQLVQTYNQLFEENPINASGVDAKAILSARLSKSRRLENLIAQLPGEKKNGLFGNLIALSLGLTPNFKSNFDLAEDAKLQLSKDTYDDDLDNLLAQIGDQYADLFLAAKNLSDAILLSDILRVNTEITKAPLSASMIKRYDEHHQDLTLLKALVRQQLPEKYKEIFFDQSKNGYAGYIDGGASQEEFYKFIKPILEKMDGTEELLVKLNREDLLRKQRTFDNGSIPHQIHLGELHAILRRQEDFYPFLKDNREKIEKILTFRIPYYVGPLARGNSRFAWMTRKSEETITPWNFEEVVDKGASAQSFIERMTNFDKNLPNEKVLPKHSLLYEYFTVYNELTKVKYVTEGMRKPAFLSGEQKKAIVDLLFKTNRKVTVKQLKEDYFKKIECFDSVEISGVEDRFNASLGTYHDLLKIIKDKDFLDNEENEDILEDIVLTLTLFEDREMIEERLKTYAHLFDDKVMKQLKRRRYTGWGRLSRKLINGIRDKQSGKTILDFLKSDGFANRNFMQLIHDDSLTFKEDIQKAQVSGQGDSLHEHIANLAGSPAIKKGILQTVKVVDELVKVMGRHKPENIVIEMARENQTTQKGQKNSRERMKRIEEGIKELGSQILKEHPVENTQLQNEKLYLYYLQNGRDMYVDQELDINRLSDYDVDHIVPQSFLKDDSIDNKVLTRSDKNRGKSDNVPSEEVVKKMKNYWRQLLNAKLITQRKFDNLTKAERGGLSELDKAGFIKRQLVETRQITKHVAQILDSRMNTKYDENDKLIREVKVITLKSKLVSDFRKDFQFYKVREINNYHHAHDAYLNAVVGTALIKKYPKLESEFVYGDYKVYDVRKMIAKSEQEIGKATAKYFFYSNIMNFFKTEITLANGEIRKRPLIETNGETGEIVWDKGRDFATVRKVLSMPQVNIVKKTEVQTGGFSKESILPKRNSDKLIARKKDWDPKKYGGFDSPTVAYSVLVVAKVEKGKSKKLKSVKELLGITIMERSSFEKNPIDFLEAKGYKEVKKDLIIKLPKYSLFELENGRKRMLASAGELQKGNELALPSKYVNFLYLASHYEKLKGSPEDNEQKQLFVEQHKHYLDEIIEQISEFSKRVILADANLDKVLSAYNKHRDKPIREQAENIIHLFTLTNLGAPAAFKYFDTTIDRKRYTSTKEVLDATLIHQSITGLYETRIDLSQLGGDSGGSGGSGGSTNLSDIIEKETGKQLVIQESILMLPEEVEEVIGNKPESDILVHTAYDESTDENVMLLTSDAPEYKPWALVIQDSNGENKIKMLSGGSGGSGGSTNLSDIIEKETGKQLVIQESILMLPEEVEEVIGNKPESDILVHTAYDESTDENVMLLTSDAPEYKPWALVIQDSNGENKIKMLSGGSKRTADGSEFEPKKKRKV

SEQ ID NO: 562 - protein, 2008 aa, synthetic construct
MKRTADGSEFESPKKKRKVKPHFRNTVERMYRDTFSYNFYNRPILSRRNTVWLCYEVKTKGPSRPPLDAKIFRGQVYSELKYHPEMRFFHWFSKWRKLHRDQEYEVTWYISWSPCTKCTRDMATFLAEDPKVTLTIFVARLYYFWDPDYQEALRSLCQKRDGPRATMKIMNYDEFQHCWSKFVYSQRELFEPWNNLPKYYILLHIMLGEILRHSMDPPTFTFNFNNEPWVRGRHETYLCYEVERMHNDTWVLLNQRRGFLCNQAPHKHGFLEGRHAELCFLDVIPFWKLDLDQDYRVTCFTSWSPCFSCAQEMAKFISKNKHVSLCIFTARIYDDQGRCQEGLRTLAEAGAKISIMTYSEFKHCWDTFVDHQGCPFQPWDGLDEHSQDLSGRLRAILQNQENSGGSSGGSSGSETPGTSESATPESSGGSSGGSDKKYSIGLAIGTNSVGWAVITDEYKVPSKKFKVLGNTDRHSIKKNLIGALLFDSGETAEATRLKRTARRRYTRRKNRICYLQEIFSNEMAKVDDSFFHRLEESFLVEEDKKHERHPIFGNIVDEVAYHEKYPTIYHLRKKLVDSTDKADLRLIYLALAHMIKFRGHFLIEGDLNPDNSDVDKLFIQLVQTYNQLFEENPINASGVDAKAILSARLSKSRRLENLIAQLPGEKKNGLFGNLIALSLGLTPNFKSNFDLAEDAKLQLSKDTYDDDLDNLLAQIGDQYADLFLAAKNLSDAILLSDILRVNTEITKAPLSASMIKRYDEHHQDLTLLKALVRQQLPEKYKEIFFDQSKNGYAGYIDGGASQEEFYKFIKPILEKMDGTEELLVKLNREDLLRKQRTFDNGSIPHQIHLGELHAILRRQEDFYPFLKDNREKIEKILTFRIPYYVGPLARGNSRFAWMTRKSEETITPWNFEEVVDKGASAQSFIERMTNFDKNLPNEKVLPKHSLLYEYFTVYNELTKVKYVTEGMRKPAFLSGEQKKAIVDLLFKTNRKVTVKQLKEDYFKKIECFDSVEISGVEDRFNASLGTYHDLLKIIKDKDFLDNEENEDILEDIVLTLTLFEDREMIEERLKTYAHLFDDKVMKQLKRRRYTGWGRLSRKLINGIRDKQSGKTILDFLKSDGFANRNFMQLIHDDSLTFKEDIQKAQVSGQGDSLHEHIANLAGSPAIKKGILQTVKVVDELVKVMGRHKPENIVIEMARENQTTQKGQKNSRERMKRIEEGIKELGSQILKEHPVENTQLQNEKLYLYYLQNGRDMYVDQELDINRLSDYDVDHIVPQSFLKDDSIDNKVLTRSDKNRGKSDNVPSEEVVKKMKNYWRQLLNAKLITQRKFDNLTKAERGGLSELDKAGFIKRQLVETRQITKHVAQILDSRMNTKYDENDKLIREVKVITLKSKLVSDFRKDFQFYKVREINNYHHAHDAYLNAVVGTALIKKYPKLESEFVYGDYKVYDVRKMIAKSEQEIGKATAKYFFYSNIMNFFKTEITLANGEIRKRPLIETNGETGEIVWDKGRDFATVRKVLSMPQVNIVKKTEVQTGGFSKESILPKRNSDKLIARKKDWDPKKYGGFDSPTVAYSVLVVAKVEKGKSKKLKSVKELLGITIMERSSFEKNPIDFLEAKGYKEVKKDLIIKLPKYSLFELENGRKRMLASAGELQKGNELALPSKYVNFLYLASHYEKLKGSPEDNEQKQLFVEQHKHYLDEIIEQISEFSKRVILADANLDKVLSAYNKHRDKPIREQAENIIHLFTLTNLGAPAAFKYFDTTIDRKRYTSTKEVLDATLIHQSITGLYETRIDLSQLGGDSGGSGGSGGSTNLSDIIEKETGKQLVIQESILMLPEEVEEVIGNKPESDILVHTAYDESTDENVMLLTSDAPEYKPWALVIQDSNGENKIKMLSGGSGGSGGSTNLSDIIEKETGKQLVIQESILMLPEEVEEVIGNKPESDILVHTAYDESTDENVMLLTSDAPEYKPWALVIQDSNGENKIKMLSGGSKRTADGSEFEPKKKRKV

SEQ ID NO: 563 - protein, 1822 aa, synthetic construct
MKRTADGSEFESPKKKRKVDSLLMNRRKFLYQFKNVRWAKGRRETYLCYVVKRRDSATSFSLDFGYLRNKNGCHVELLFLRYISDWDLDPGRCYRVTWFTSWSPCYDCARHVADFLRGNPNLSLRIFTARLYFCEDRKAEPEGLRRLHRAGVQIAIMTFKDYFYCWNTFVENHERTFKAWEGLHENSVRLSRQLRRILLPLYEVDDLRDAFRTLGLSGGSSGGSSGSETPGTSESATPESSGGSSGGSDKKYSIGLAIGTNSVGWAVITDEYKVPSKKFKVLGNTDRHSIKKNLIGALLFDSGETAEATRLKRTARRRYTRRKNRICYLQEIFSNEMAKVDDSFFHRLEESFLVEEDKKHERHPIFGNIVDEVAYHEKYPTIYHLRKKLVDSTDKADLRLIYLALAHMIKFRGHFLIEGDLNPDNSDVDKLFIQLVQTYNQLFEENPINASGVDAKAILSARLSKSRRLENLIAQLPGEKKNGLFGNLIALSLGLTPNFKSNFDLAEDAKLQLSKDTYDDDLDNLLAQIGDQYADLFLAAKNLSDAILLSDILRVNTEITKAPLSASMIKRYDEHHQDLTLLKALVRQQLPEKYKEIFFDQSKNGYAGYIDGGASQEEFYKFIKPILEKMDGTEELLVKLNREDLLRKQRTFDNGSIPHQIHLGELHAILRRQEDFYPFLKDNREKIEKILTFRIPYYVGPLARGNSRFAWMTRKSEETITPWNFEEVVDKGASAQSFIERMTNFDKNLPNEKVLPKHSLLYEYFTVYNELTKVKYVTEGMRKPAFLSGEQKKAIVDLLFKTNRKVTVKQLKEDYFKKIECFDSVEISGVEDRFNASLGTYHDLLKIIKDKDFLDNEENEDILEDIVLTLTLFEDREMIEERLKTYAHLFDDKVMKQLKRRRYTGWGRLSRKLINGIRDKQSGKTILDFLKSDGFANRNFMQLIHDDSLTFKEDIQKAQVSGQGDSLHEHIANLAGSPAIKKGILQTVKVVDELVKVMGRHKPENIVIEMARENQTTQKGQKNSRERMKRIEEGIKELGSQILKEHPVENTQLQNEKLYLYYLQNGRDMYVDQELDINRLSDYDVDHIVPQSFLKDDSIDNKVLTRSDKNRGKSDNVPSEEVVKKMKNYWRQLLNAKLITQRKFDNLTKAERGGLSELDKAGFIKRQLVETRQITKHVAQILDSRMNTKYDENDKLIREVKVITLKSKLVSDFRKDFQFYKVREINNYHHAHDAYLNAVVGTALIKKYPKLESEFVYGDYKVYDVRKMIAKSEQEIGKATAKYFFYSNIMNFFKTEITLANGEIRKRPLIETNGETGEIVWDKGRDFATVRKVLSMPQVNIVKKTEVQTGGFSKESILPKRNSDKLIARKKDWDPKKYGGFDSPTVAYSVLVVAKVEKGKSKKLKSVKELLGITIMERSSFEKNPIDFLEAKGYKEVKKDLIIKLPKYSLFELENGRKRMLASAGELQKGNELALPSKYVNFLYLASHYEKLKGSPEDNEQKQLFVEQHKHYLDEIIEQISEFSKRVILADANLDKVLSAYNKHRDKPIREQAENIIHLFTLTNLGAPAAFKYFDTTIDRKRYTSTKEVLDATLIHQSITGLYETRIDLSQLGGDSGGSGGSGGSTNLSDIIEKETGKQLVIQESILMLPEEVEEVIGNKPESDILVHTAYDESTDENVMLLTSDAPEYKPWALVIQDSNGENKIKMLSGGSGGSGGSTNLSDIIEKETGKQLVIQESILMLPEEVEEVIGNKPESDILVHTAYDESTDENVMLLTSDAPEYKPWALVIQDSNGENKIKMLSGGSKRTADGSEFEPKKKRKV

SEQ ID NO: 564 - protein, 1832 aa, synthetic construct
MKRTADGSEFESPKKKRKVTDAEYVRIHEKLDIYTFKKQFFNNKKSVSHRCYVLFELKRRGERRACFWGYAVNKPQSGTERGIHAEIFSIRKVEEYLRDNPGQFTINWYSSWSPCADCAEKILEWYNQELRGNGHTLKIWACKLYYEKNARNQIGLWNLRDNGVGLNVMVSEHYQCCRKIFIQSSHNQLNENRWLEKTLKRAEKRRSELSIMIQVKILHTTKSPAVSGGSSGGSSGSETPGTSESATPESSGGSSGGSDKKYSIGLAIGTNSVGWAVITDEYKVPSKKFKVLGNTDRHSIKKNLIGALLFDSGETAEATRLKRTARRRYTRRKNRICYLQEIFSNEMAKVDDSFFHRLEESFLVEEDKKHERHPIFGNIVDEVAYHEKYPTIYHLRKKLVDSTDKADLRLIYLALAHMIKFRGHFLIEGDLNPDNSDVDKLFIQLVQTYNQLFEENPINASGVDAKAILSARLSKSRRLENLIAQLPGEKKNGLFGNLIALSLGLTPNFKSNFDLAEDAKLQLSKDTYDDDLDNLLAQIGDQYADLFLAAKNLSDAILLSDILRVNTEITKAPLSASMIKRYDEHHQDLTLLKALVRQQLPEKYKEIFFDQSKNGYAGYIDGGASQEEFYKFIKPILEKMDGTEELLVKLNREDLLRKQRTFDNGSIPHQIHLGELHAILRRQEDFYPFLKDNREKIEKILTFRIPYYVGPLARGNSRFAWMTRKSEETITPWNFEEVVDKGASAQSFIERMTNFDKNLPNEKVLPKHSLLYEYFTVYNELTKVKYVTEGMRKPAFLSGEQKKAIVDLLFKTNRKVTVKQLKEDYFKKIECFDSVEISGVEDRFNASLGTYHDLLKIIKDKDFLDNEENEDILEDIVLTLTLFEDREMIEERLKTYAHLFDDKVMKQLKRRRYTGWGRLSRKLINGIRDKQSGKTILDFLKSDGFANRNFMQLIHDDSLTFKEDIQKAQVSGQGDSLHEHIANLAGSPAIKKGILQTVKVVDELVKVMGRHKPENIVIEMARENQTTQKGQKNSRERMKRIEEGIKELGSQILKEHPVENTQLQNEKLYLYYLQNGRDMYVDQELDINRLSDYDVDHIVPQSFLKDDSIDNKVLTRSDKNRGKSDNVPSEEVVKKMKNYWRQLLNAKLITQRKFDNLTKAERGGLSELDKAGFIKRQLVETRQITKHVAQILDSRMNTKYDENDKLIREVKVITLKSKLVSDFRKDFQFYKVREINNYHHAHDAYLNAVVGTALIKKYPKLESEFVYGDYKVYDVRKMIAKSEQEIGKATAKYFFYSNIMNFFKTEITLANGEIRKRPLIETNGETGEIVWDKGRDFATVRKVLSMPQVNIVKKTEVQTGGFSKESILPKRNSDKLIARKKDWDPKKYGGFDSPTVAYSVLVVAKVEKGKSKKLKSVKELLGITIMERSSFEKNPIDFLEAKGYKEVKKDLIIKLPKYSLFELENGRKRMLASAGELQKGNELALPSKYVNFLYLASHYEKLKGSPEDNEQKQLFVEQHKHYLDEIIEQISEFSKRVILADANLDKVLSAYNKHRDKPIREQAENIIHLFTLTNLGAPAAFKYFDTTIDRKRYTSTKEVLDATLIHQSITGLYETRIDLSQLGGDSGGSGGSGGSTNLSDIIEKETGKQLVIQESILMLPEEVEEVIGNKPESDILVHTAYDESTDENVMLLTSDAPEYKPWALVIQDSNGENKIKMLSGGSGGSGGSTNLSDIIEKETGKQLVIQESILMLPEEVEEVIGNKPESDILVHTAYDESTDENVMLLTSDAPEYKPWALVIQDSNGENKIKMLSGGSKRTADGSEFEPKKKRKV

SEQ ID NO: 565 - protein, 1786 aa, synthetic construct
MKRTADGSEFESPKKKRKVFERNYDPRELRKETYLLYEIKWGKSGKLWRHWCQNNRTQHAEVYFLENIFNARRFNPSTHCSITWYLSWSPCAECSQKIVDFLKEHPNVNLEIYVARLYYHEDERNRQGLRDLVNSGVTIRIMDLPDYNYCWKTFVSDQGGDEDYWPGHFAPWIKQYSLKLSGGSSGGSSGSETPGTSESATPESSGGSSGGSDKKYSIGLAIGTNSVGWAVITDEYKVPSKKFKVLGNTDRHSIKKNLIGALLFDSGETAEATRLKRTARRRYTRRKNRICYLQEIFSNEMAKVDDSFFHRLEESFLVEEDKKHERHPIFGNIVDEVAYHEKYPTIYHLRKKLVDSTDKADLRLIYLALAHMIKFRGHFLIEGDLNPDNSDVDKLFIQLVQTYNQLFEENPINASGVDAKAILSARLSKSRRLENLIAQLPGEKKNGLFGNLIALSLGLTPNFKSNFDLAEDAKLQLSKDTYDDDLDNLLAQIGDQYADLFLAAKNLSDAILLSDILRVNTEITKAPLSASMIKRYDEHHQDLTLLKALVRQQLPEKYKEIFFDQSKNGYAGYIDGGASQEEFYKFIKPILEKMDGTEELLVKLNREDLLRKQRTFDNGSIPHQIHLGELHAILRRQEDFYPFLKDNREKIEKILTFRIPYYVGPLARGNSRFAWMTRKSEETITPWNFEEVVDKGASAQSFIERMTNFDKNLPNEKVLPKHSLLYEYFTVYNELTKVKYVTEGMRKPAFLSGEQKKAIVDLLFKTNRKVTVKQLKEDYFKKIECFDSVEISGVEDRFNASLGTYHDLLKIIKDKDFLDNEENEDILEDIVLTLTLFEDREMIEERLKTYAHLFDDKVMKQLKRRRYTGWGRLSRKLINGIRDKQSGKTILDFLKSDGFANRNFMQLIHDDSLTFKEDIQKAQVSGQGDSLHEHIANLAGSPAIKKGILQTVKVVDELVKVMGRHKPENIVIEMARENQTTQKGQKNSRERMKRIEEGIKELGSQILKEHPVENTQLQNEKLYLYYLQNGRDMYVDQELDINRLSDYDVDHIVPQSFLKDDSIDNKVLTRSDKNRGKSDNVPSEEVVKKMKNYWRQLLNAKLITQRKFDNLTKAERGGLSELDKAGFIKRQLVETRQITKHVAQILDSRMNTKYDENDKLIREVKVITLKSKLVSDFRKDFQFYKVREINNYHHAHDAYLNAVVGTALIKKYPKLESEFVYGDYKVYDVRKMIAKSEQEIGKATAKYFFYSNIMNFFKTEITLANGEIRKRPLIETNGETGEIVWDKGRDFATVRKVLSMPQVNIVKKTEVQTGGFSKESILPKRNSDKLIARKKDWDPKKYGGFDSPTVAYSVLVVAKVEKGKSKKLKSVKELLGITIMERSSFEKNPIDFLEAKGYKEVKKDLIIKLPKYSLFELENGRKRMLASAGELQKGNELALPSKYVNFLYLASHYEKLKGSPEDNEQKQLFVEQHKHYLDEIIEQISEFSKRVILADANLDKVLSAYNKHRDKPIREQAENIIHLFTLTNLGAPAAFKYFDTTIDRKRYTSTKEVLDATLIHQSITGLYETRIDLSQLGGDSGGSGGSGGSTNLSDIIEKETGKQLVIQESILMLPEEVEEVIGNKPESDILVHTAYDESTDENVMLLTSDAPEYKPWALVIQDSNGENKIKMLSGGSGGSGGSTNLSDIIEKETGKQLVIQESILMLPEEVEEVIGNKPESDILVHTAYDESTDENVMLLTSDAPEYKPWALVIQDSNGENKIKMLSGGSKRTADGSEFEPKKKRKV

SEQ ID NO: 566 - protein, 1823 aa, synthetic construct
MKRTADGSEFESPKKKRKVEASPASGPRHLMDPHIFTSNFNNGIGRHKTYLCYEVERLDNGTSVKMDQHRGFLHGQAKNLLCGFYGRHAELRFLDLVPSLQLDPAQIYRVTWFISWSPCFSWGCAGEVRAFLQENTHVRLRIFAARIYDYDPLYKEALQMLRDAGAQVSIMTYDEFKHCWDTFVDHQGCPFQPWDGLDEHSQALSGRLRAILQNQGNSGGSSGGSSGSETPGTSESATPESSGGSSGGSDKKYSIGLAIGTNSVGWAVITDEYKVPSKKFKVLGNTDRHSIKKNLIGALLFDSGETAEATRLKRTARRRYTRRKNRICYLQEIFSNEMAKVDDSFFHRLEESFLVEEDKKHERHPIFGNIVDEVAYHEKYPTIYHLRKKLVDSTDKADLRLIYLALAHMIKFRGHFLIEGDLNPDNSDVDKLFIQLVQTYNQLFEENPINASGVDAKAILSARLSKSRRLENLIAQLPGEKKNGLFGNLIALSLGLTPNFKSNFDLAEDAKLQLSKDTYDDDLDNLLAQIGDQYADLFLAAKNLSDAILLSDILRVNTEITKAPLSASMIKRYDEHHQDLTLLKALVRQQLPEKYKEIFFDQSKNGYAGYIDGGASQEEFYKFIKPILEKMDGTEELLVKLNREDLLRKQRTFDNGSIPHQIHLGELHAILRRQEDFYPFLKDNREKIEKILTFRIPYYVGPLARGNSRFAWMTRKSEETITPWNFEEVVDKGASAQSFIERMTNFDKNLPNEKVLPKHSLLYEYFTVYNELTKVKYVTEGMRKPAFLSGEQKKAIVDLLFKTNRKVTVKQLKEDYFKKIECFDSVEISGVEDRFNASLGTYHDLLKIIKDKDFLDNEENEDILEDIVLTLTLFEDREMIEERLKTYAHLFDDKVMKQLKRRRYTGWGRLSRKLINGIRDKQSGKTILDFLKSDGFANRNFMQLIHDDSLTFKEDIQKAQVSGQGDSLHEHIANLAGSPAIKKGILQTVKVVDELVKVMGRHKPENIVIEMARENQTTQKGQKNSRERMKRIEEGIKELGSQILKEHPVENTQLQNEKLYLYYLQNGRDMYVDQELDINRLSDYDVDHIVPQSFLKDDSIDNKVLTRSDKNRGKSDNVPSEEVVKKMKNYWRQLLNAKLITQRKFDNLTKAERGGLSELDKAGFIKRQLVETRQITKHVAQILDSRMNTKYDENDKLIREVKVITLKSKLVSDFRKDFQFYKVREINNYHHAHDAYLNAVVGTALIKKYPKLESEFVYGDYKVYDVRKMIAKSEQEIGKATAKYFFYSNIMNFFKTEITLANGEIRKRPLIETNGETGEIVWDKGRDFATVRKVLSMPQVNIVKKTEVQTGGFSKESILPKRNSDKLIARKKDWDPKKYGGFDSPTVAYSVLVVAKVEKGKSKKLKSVKELLGITIMERSSFEKNPIDFLEAKGYKEVKKDLIIKLPKYSLFELENGRKRMLASAGELQKGNELALPSKYVNFLYLASHYEKLKGSPEDNEQKQLFVEQHKHYLDEIIEQISEFSKRVILADANLDKVLSAYNKHRDKPIREQAENIIHLFTLTNLGAPAAFKYFDTTIDRKRYTSTKEVLDATLIHQSITGLYETRIDLSQLGGDSGGSGGSGGSTNLSDIIEKETGKQLVIQESILMLPEEVEEVIGNKPESDILVHTAYDESTDENVMLLTSDAPEYKPWALVIQDSNGENKIKMLSGGSGGSGGSTNLSDIIEKETGKQLVIQESILMLPEEVEEVIGNKPESDILVHTAYDESTDENVMLLTSDAPEYKPWALVIQDSNGENKIKMLSGGSKRTADGSEFEPKKKRKV

SEQ ID NO: 567 - protein, 1853 aa, synthetic construct
MKRTADGSEFESPKKKRKVSSETGPVAVDPTLRRRIEPHEFEVFFDPRELAAETCLLYEINWGGRHSIWRHTSQNTNKHVEVNFIEKFTTERYFCPNTRCSITWFLSWSPCGECSRAITEFLSRYPHVTLFIYIARLYHLANPRNRQGLRDLISSGVTIQIMTEQESGYCWRNFVNYSPSNEAHWPRYPHLWVRLYVLELYCIILGLPPCLNILRRKQPQLTFFTIALQSCHYQRLPPHILWATGLKSGGSSGGSSGSETPGTSESATPESSGGSSGGSDKKYSIGLAIGTNSVGWAVITDEYKVPSKKFKVLGNTDRHSIKKNLIGALLFDSGETAEATRLKRTARRRYTRRKNRICYLQEIFSNEMAKVDDSFFHRLEESFLVEEDKKHERHPIFGNIVDEVAYHEKYPTIYHLRKKLVDSTDKADLRLIYLALAHMIKFRGHFLIEGDLNPDNSDVDKLFIQLVQTYNQLFEENPINASGVDAKAILSARLSKSRRLENLIAQLPGEKKNGLFGNLIALSLGLTPNFKSNFDLAEDAKLQLSKDTYDDDLDNLLAQIGDQYADLFLAAKNLSDAILLSDILRVNTEITKAPLSASMIKRYDEHHQDLTLLKALVRQQLPEKYKEIFFDQSKNGYAGYIDGGASQEEFYKFIKPILEKMDGTEELLVKLNREDLLRKQRTFDNGSIPHQIHLGELHAILRRQEDFYPFLKDNREKIEKILTFRIPYYVGPLARGNSRFAWMTRKSEETITPWNFEEVVDKGASAQSFIERMTNFDKNLPNEKVLPKHSLLYEYFTVYNELTKVKYVTEGMRKPAFLSGEQKKAIVDLLFKTNRKVTVKQLKEDYFKKIECFDSVEISGVEDRFNASLGTYHDLLKIIKDKDFLDNEENEDILEDIVLTLTLFEDREMIEERLKTYAHLFDDKVMKQLKRRRYTGWGRLSRKLINGIRDKQSGKTILDFLKSDGFANRNFMQLIHDDSLTFKEDIQKAQVSGQGDSLHEHIANLAGSPAIKKGILQTVKVVDELVKVMGRHKPENIVIEMARENQTTQKGQKNSRERMKRIEEGIKELGSQILKEHPVENTQLQNEKLYLYYLQNGRDMYVDQELDINRLSDYDVDHIVPQSFLKDDSIDNKVLTRSDKNRGKSDNVPSEEVVKKMKNYWRQLLNAKLITQRKFDNLTKAERGGLSELDKAGFIKRQLVETRQITKHVAQILDSRMNTKYDENDKLIREVKVITLKSKLVSDFRKDFQFYKVREINNYHHAHDAYLNAVVGTALIKKYPKLESEFVYGDYKVYDVRKMIAKSEQEIGKATAKYFFYSNIMNFFKTEITLANGEIRKRPLIETNGETGEIVWDKGRDFATVRKVLSMPQVNIVKKTEVQTGGFSKESILPKRNSDKLIARKKDWDPKKYGGFDSPTVAYSVLVVAKVEKGKSKKLKSVKELLGITIMERSSFEKNPIDFLEAKGYKEVKKDLIIKLPKYSLFELENGRKRMLASAGELQKGNELALPSKYVNFLYLASHYEKLKGSPEDNEQKQLFVEQHKHYLDEIIEQISEFSKRVILADANLDKVLSAYNKHRDKPIREQAENIIHLFTLTNLGAPAAFKYFDTTIDRKRYTSTKEVLDATLIHQSITGLYETRIDLSQLGGDSGGSGGSGGSTNLSDIIEKETGKQLVIQESILMLPEEVEEVIGNKPESDILVHTAYDESTDENVMLLTSDAPEYKPWALVIQDSNGENKIKMLSGGSGGSGGSTNLSDIIEKETGKQLVIQESILMLPEEVEEVIGNKPESDILVHTAYDESTDENVMLLTSDAPEYKPWALVIQDSNGENKIKMLSGGSKRTADGSEFEPKKKRKV

SEQ ID NO: 568 - protein, 1853 aa, synthetic construct
MKRTADGSEFESPKKKRKVSSETGPVAVDPTLRRRIEPHEFEVFFDPRELRKETCLLYEINWGGRHSIWRHTSQNTNKHVEVNFIEKFTTERYFCPNTRCSITWFLSWSPCGECSRAITEFLSRYPHVTLFIYIARLYHHADPRNRQGLRDLISSGVTIQIMTEQESGYCWRNFVNYSPSNEAHWPRYPHLWVRLYVLELYCIILGLPPCLNILRRKQPQLTFFTIALQSCHYQRLPPHILWATGLKSGGSSGGSSGSETPGTSESATPESSGGSSGGSDKKYSIGLAIGTNSVGWAVITDEYKVPSKKFKVLGNTDRHSIKKNLIGALLFDSGETAEATRLKRTARRRYTRRKNRICYLQEIFSNEMAKVDDSFFHRLEESFLVEEDKKHERHPIFGNIVDEVAYHEKYPTIYHLRKKLVDSTDKADLRLIYLALAHMIKFRGHFLIEGDLNPDNSDVDKLFIQLVQTYNQLFEENPINASGVDAKAILSARLSKSRRLENLIAQLPGEKKNGLFGNLIALSLGLTPNFKSNFDLAEDAKLQLSKDTYDDDLDNLLAQIGDQYADLFLAAKNLSDAILLSDILRVNTEITKAPLSASMIKRYDEHHQDLTLLKALVRQQLPEKYKEIFFDQSKNGYAGYIDGGASQEEFYKFIKPILEKMDGTEELLVKLNREDLLRKQRTFDNGSIPHQIHLGELHAILRRQEDFYPFLKDNREKIEKILTFRIPYYVGPLARGNSRFAWMTRKSEETITPWNFEEVVDKGASAQSFIERMTNFDKNLPNEKVLPKHSLLYEYFTVYNELTKVKYVTEGMRKPAFLSGEQKKAIVDLLFKTNRKVTVKQLKEDYFKKIECFDSVEISGVEDRFNASLGTYHDLLKIIKDKDFLDNEENEDILEDIVLTLTLFEDREMIEERLKTYAHLFDDKVMKQLKRRRYTGWGRLSRKLINGIRDKQSGKTILDFLKSDGFANRNFMQLIHDDSLTFKEDIQKAQVSGQGDSLHEHIANLAGSPAIKKGILQTVKVVDELVKVMGRHKPENIVIEMARENQTTQKGQKNSRERMKRIEEGIKELGSQILKEHPVENTQLQNEKLYLYYLQNGRDMYVDQELDINRLSDYDVDHIVPQSFLKDDSIDNKVLTRSDKNRGKSDNVPSEEVVKKMKNYWRQLLNAKLITQRKFDNLTKAERGGLSELDKAGFIKRQLVETRQITKHVAQILDSRMNTKYDENDKLIREVKVITLKSKLVSDFRKDFQFYKVREINNYHHAHDAYLNAVVGTALIKKYPKLESEFVYGDYKVYDVRKMIAKSEQEIGKATAKYFFYSNIMNFFKTEITLANGEIRKRPLIETNGETGEIVWDKGRDFATVRKVLSMPQVNIVKKTEVQTGGFSKESIRPKRNSDKLIARKKDWDPKKYGGFVSPTVAYSVLVVAKVEKGKSKKLKSVKELLGITIMERSSFEKNPIDFLEAKGYKEVKKDLIIKLPKYSLFELENGRKRMLASARFLQKGNELALPSKYVNFLYLASHYEKLKGSPEDNEQKQLFVEQHKHYLDEIIEQISEFSKRVILADANLDKVLSAYNKHRDKPIREQAENIIHLFTLTNLGAPRAFKYFDTTIDRKVYRSTKEVLDATLIHQSITGLYETRIDLSQLGGDSGGSGGSGGSTNLSDIIEKETGKQLVIQESILMLPEEVEEVIGNKPESDILVHTAYDESTDENVMLLTSDAPEYKPWALVIQDSNGENKIKMLSGGSGGSGGSTNLSDIIEKETGKQLVIQESILMLPEEVEEVIGNKPESDILVHTAYDESTDENVMLLTSDAPEYKPWALVIQDSNGENKIKMLSGGSKRTADGSEFEPKKKRKV

SEQ ID NO: 569 - protein, 1853 aa, synthetic construct
MKRTADGSEFESPKKKRKVSSETGPVAVDPTLRRRIEPHEFEVFFDPRELRKETCLLYEINWGGRHSIWRHTSQNTNKHVEVNFIEKFTTERYFCPNTRCSITWFLSYSPCGECSRAITEFLSRYPHVTLFIYIARLYHHADPENRQGLRDLISSGVTIQIMTEQESGYCWRNFVNYSPSNEAHWPRYPHLWVRLYVLELYCIILGLPPCLNILRRKQPQLTFFTIALQSCHYQRLPPHILWATGLKSGGSSGGSSGSETPGTSESATPESSGGSSGGSDKKYSIGLAIGTNSVGWAVITDEYKVPSKKFKVLGNTDRHSIKKNLIGALLFDSGETAEATRLKRTARRRYTRRKNRICYLQEIFSNEMAKVDDSFFHRLEESFLVEEDKKHERHPIFGNIVDEVAYHEKYPTIYHLRKKLVDSTDKADLRLIYLALAHMIKFRGHFLIEGDLNPDNSDVDKLFIQLVQTYNQLFEENPINASGVDAKAILSARLSKSRRLENLIAQLPGEKKNGLFGNLIALSLGLTPNFKSNFDLAEDAKLQLSKDTYDDDLDNLLAQIGDQYADLFLAAKNLSDAILLSDILRVNTEITKAPLSASMIKRYDEHHQDLTLLKALVRQQLPEKYKEIFFDQSKNGYAGYIDGGASQEEFYKFIKPILEKMDGTEELLVKLNREDLLRKQRTFDNGSIPHQIHLGELHAILRRQEDFYPFLKDNREKIEKILTFRIPYYVGPLARGNSRFAWMTRKSEETITPWNFEEVVDKGASAQSFIERMTNFDKNLPNEKVLPKHSLLYEYFTVYNELTKVKYVTEGMRKPAFLSGEQKKAIVDLLFKTNRKVTVKQLKEDYFKKIECFDSVEISGVEDRFNASLGTYHDLLKIIKDKDFLDNEENEDILEDIVLTLTLFEDREMIEERLKTYAHLFDDKVMKQLKRRRYTGWGRLSRKLINGIRDKQSGKTILDFLKSDGFANRNFMQLIHDDSLTFKEDIQKAQVSGQGDSLHEHIANLAGSPAIKKGILQTVKVVDELVKVMGRHKPENIVIEMARENQTTQKGQKNSRERMKRIEEGIKELGSQILKEHPVENTQLQNEKLYLYYLQNGRDMYVDQELDINRLSDYDVDHIVPQSFLKDDSIDNKVLTRSDKNRGKSDNVPSEEVVKKMKNYWRQLLNAKLITQRKFDNLTKAERGGLSELDKAGFIKRQLVETRQITKHVAQILDSRMNTKYDENDKLIREVKVITLKSKLVSDFRKDFQFYKVREINNYHHAHDAYLNAVVGTALIKKYPKLESEFVYGDYKVYDVRKMIAKSEQEIGKATAKYFFYSNIMNFFKTEITLANGEIRKRPLIETNGETGEIVWDKGRDFATVRKVLSMPQVNIVKKTEVQTGGFSKESIRPKRNSDKLIARKKDWDPKKYGGFVSPTVAYSVLVVAKVEKGKSKKLKSVKELLGITIMERSSFEKNPIDFLEAKGYKEVKKDLIIKLPKYSLFELENGRKRMLASARFLQKGNELALPSKYVNFLYLASHYEKLKGSPEDNEQKQLFVEQHKHYLDEIIEQISEFSKRVILADANLDKVLSAYNKHRDKPIREQAENIIHLFTLTNLGAPRAFKYFDTTIDRKVYRSTKEVLDATLIHQSITGLYETRIDLSQLGGDSGGSGGSGGSTNLSDIIEKETGKQLVIQESILMLPEEVEEVIGNKPESDILVHTAYDESTDENVMLLTSDAPEYKPWALVIQDSNGENKIKMLSGGSGGSGGSTNLSDIIEKETGKQLVIQESILMLPEEVEEVIGNKPESDILVHTAYDESTDENVMLLTSDAPEYKPWALVIQDSNGENKIKMLSGGSKRTADGSEFEPKKKRKV

SEQ ID NO: 570 - protein, 1853 aa, synthetic construct
MKRTADGSEFESPKKKRKVSSETGPVAVDPTLRRRIEPHEFEVFFDPRELRKETCLLYEINWGGRHSIWRHTSQNTNKHVEVNFIEKFTTERYFCPNTRCSITWFLSYSPCGECSRAITEFLSRYPHVTLFIYIARLYHHADPRNRQGLEDLISSGVTIQIMTEQESGYCWRNFVNYSPSNEAHWPRYPHLWVRLYVLELYCIILGLPPCLNILRRKQPQLTFFTIALQSCHYQRLPPHILWATGLKSGGSSGGSSGSETPGTSESATPESSGGSSGGSDKKYSIGLAIGTNSVGWAVITDEYKVPSKKFKVLGNTDRHSIKKNLIGALLFDSGETAEATRLKRTARRRYTRRKNRICYLQEIFSNEMAKVDDSFFHRLEESFLVEEDKKHERHPIFGNIVDEVAYHEKYPTIYHLRKKLVDSTDKADLRLIYLALAHMIKFRGHFLIEGDLNPDNSDVDKLFIQLVQTYNQLFEENPINASGVDAKAILSARLSKSRRLENLIAQLPGEKKNGLFGNLIALSLGLTPNFKSNFDLAEDAKLQLSKDTYDDDLDNLLAQIGDQYADLFLAAKNLSDAILLSDILRVNTEITKAPLSASMIKRYDEHHQDLTLLKALVRQQLPEKYKEIFFDQSKNGYAGYIDGGASQEEFYKFIKPILEKMDGTEELLVKLNREDLLRKQRTFDNGSIPHQIHLGELHAILRRQEDFYPFLKDNREKIEKILTFRIPYYVGPLARGNSRFAWMTRKSEETITPWNFEEVVDKGASAQSFIERMTNFDKNLPNEKVLPKHSLLYEYFTVYNELTKVKYVTEGMRKPAFLSGEQKKAIVDLLFKTNRKVTVKQLKEDYFKKIECFDSVEISGVEDRFNASLGTYHDLLKIIKDKDFLDNEENEDILEDIVLTLTLFEDREMIEERLKTYAHLFDDKVMKQLKRRRYTGWGRLSRKLINGIRDKQSGKTILDFLKSDGFANRNFMQLIHDDSLTFKEDIQKAQVSGQGDSLHEHIANLAGSPAIKKGILQTVKVVDELVKVMGRHKPENIVIEMARENQTTQKGQKNSRERMKRIEEGIKELGSQILKEHPVENTQLQNEKLYLYYLQNGRDMYVDQELDINRLSDYDVDHIVPQSFLKDDSIDNKVLTRSDKNRGKSDNVPSEEVVKKMKNYWRQLLNAKLITQRKFDNLTKAERGGLSELDKAGFIKRQLVETRQITKHVAQILDSRMNTKYDENDKLIREVKVITLKSKLVSDFRKDFQFYKVREINNYHHAHDAYLNAVVGTALIKKYPKLESEFVYGDYKVYDVRKMIAKSEQEIGKATAKYFFYSNIMNFFKTEITLANGEIRKRPLIETNGETGEIVWDKGRDFATVRKVLSMPQVNIVKKTEVQTGGFSKESIRPKRNSDKLIARKKDWDPKKYGGFVSPTVAYSVLVVAKVEKGKSKKLKSVKELLGITIMERSSFEKNPIDFLEAKGYKEVKKDLIIKLPKYSLFELENGRKRMLASARFLQKGNELALPSKYVNFLYLASHYEKLKGSPEDNEQKQLFVEQHKHYLDEIIEQISEFSKRVILADANLDKVLSAYNKHRDKPIREQAENIIHLFTLTNLGAPRAFKYFDTTIDRKVYRSTKEVLDATLIHQSITGLYETRIDLSQLGGDSGGSGGSGGSTNLSDIIEKETGKQLVIQESILMLPEEVEEVIGNKPESDILVHTAYDESTDENVMLLTSDAPEYKPWALVIQDSNGENKIKMLSGGSGGSGGSTNLSDIIEKETGKQLVIQESILMLPEEVEEVIGNKPESDILVHTAYDESTDENVMLLTSDAPEYKPWALVIQDSNGENKIKMLSGGSKRTADGSEFEPKKKRKV

SEQ ID NO: 571 - protein, 1853 aa, synthetic construct
MKRTADGSEFESPKKKRKVSSETGPVAVDPTLRRRIEPHEFEVFFDPRELRKETCLLYEINWGGRHSIWRHTSQNTNKHVEVNFIEKFTTERYFCPNTRCSITWFLSYSPCGECSRAITEFLSRYPHVTLFIYIARLYHHADPENRQGLEDLISSGVTIQIMTEQESGYCWRNFVNYSPSNEAHWPRYPHLWVRLYVLELYCIILGLPPCLNILRRKQPQLTFFTIALQSCHYQRLPPHILWATGLKSGGSSGGSSGSETPGTSESATPESSGGSSGGSDKKYSIGLAIGTNSVGWAVITDEYKVPSKKFKVLGNTDRHSIKKNLIGALLFDSGETAEATRLKRTARRRYTRRKNRICYLQEIFSNEMAKVDDSFFHRLEESFLVEEDKKHERHPIFGNIVDEVAYHEKYPTIYHLRKKLVDSTDKADLRLIYLALAHMIKFRGHFLIEGDLNPDNSDVDKLFIQLVQTYNQLFEENPINASGVDAKAILSARLSKSRRLENLIAQLPGEKKNGLFGNLIALSLGLTPNFKSNFDLAEDAKLQLSKDTYDDDLDNLLAQIGDQYADLFLAAKNLSDAILLSDILRVNTEITKAPLSASMIKRYDEHHQDLTLLKALVRQQLPEKYKEIFFDQSKNGYAGYIDGGASQEEFYKFIKPILEKMDGTEELLVKLNREDLLRKQRTFDNGSIPHQIHLGELHAILRRQEDFYPFLKDNREKIEKILTFRIPYYVGPLARGNSRFAWMTRKSEETITPWNFEEVVDKGASAQSFIERMTNFDKNLPNEKVLPKHSLLYEYFTVYNELTKVKYVTEGMRKPAFLSGEQKKAIVDLLFKTNRKVTVKQLKEDYFKKIECFDSVEISGVEDRFNASLGTYHDLLKIIKDKDFLDNEENEDILEDIVLTLTLFEDREMIEERLKTYAHLFDDKVMKQLKRRRYTGWGRLSRKLINGIRDKQSGKTILDFLKSDGFANRNFMQLIHDDSLTFKEDIQKAQVSGQGDSLHEHIANLAGSPAIKKGILQTVKVVDELVKVMGRHKPENIVIEMARENQTTQKGQKNSRERMKRIEEGIKELGSQILKEHPVENTQLQNEKLYLYYLQNGRDMYVDQELDINRLSDYDVDHIVPQSFLKDDSIDNKVLTRSDKNRGKSDNVPSEEVVKKMKNYWRQLLNAKLITQRKFDNLTKAERGGLSELDKAGFIKRQLVETRQITKHVAQILDSRMNTKYDENDKLIREVKVITLKSKLVSDFRKDFQFYKVREINNYHHAHDAYLNAVVGTALIKKYPKLESEFVYGDYKVYDVRKMIAKSEQEIGKATAKYFFYSNIMNFFKTEITLANGEIRKRPLIETNGETGEIVWDKGRDFATVRKVLSMPQVNIVKKTEVQTGGFSKESIRPKRNSDKLIARKKDWDPKKYGGFVSPTVAYSVLVVAKVEKGKSKKLKSVKELLGITIMERSSFEKNPIDFLEAKGYKEVKKDLIIKLPKYSLFELENGRKRMLASARFLQKGNELALPSKYVNFLYLASHYEKLKGSPEDNEQKQLFVEQHKHYLDEIIEQISEFSKRVILADANLDKVLSAYNKHRDKPIREQAENIIHLFTLTNLGAPRAFKYFDTTIDRKVYRSTKEVLDATLIHQSITGLYETRIDLSQLGGDSGGSGGSGGSTNLSDIIEKETGKQLVIQESILMLPEEVEEVIGNKPESDILVHTAYDESTDENVMLLTSDAPEYKPWALVIQDSNGENKIKMLSGGSGGSGGSTNLSDIIEKETGKQLVIQESILMLPEEVEEVIGNKPESDILVHTAYDESTDENVMLLTSDAPEYKPWALVIQDSNGENKIKMLSGGSKRTADGSEFEPKKKRKV

SEQ ID NO: 572 - protein, 1853 aa, synthetic construct
MKRTADGSEFESPKKKRKVSSETGPVAVDPTLRRRIEPHEFEVFFDPRELRKETCLLYEINWGGRHSIWRHTSQNTNKHVEVNFIEKFTTERYFCPNTRCSITWFLSWSPCGECSRAITEFLSRYPHVTLFIYIARLYHHADPENRQGLEDLISSGVTIQIMTEQESGYCWRNFVNYSPSNEAHWPRYPHLWVRLYVLELYCIILGLPPCLNILRRKQPQLTFFTIALQSCHYQRLPPHILWATGLKSGGSSGGSSGSETPGTSESATPESSGGSSGGSDKKYSIGLAIGTNSVGWAVITDEYKVPSKKFKVLGNTDRHSIKKNLIGALLFDSGETAEATRLKRTARRRYTRRKNRICYLQEIFSNEMAKVDDSFFHRLEESFLVEEDKKHERHPIFGNIVDEVAYHEKYPTIYHLRKKLVDSTDKADLRLIYLALAHMIKFRGHFLIEGDLNPDNSDVDKLFIQLVQTYNQLFEENPINASGVDAKAILSARLSKSRRLENLIAQLPGEKKNGLFGNLIALSLGLTPNFKSNFDLAEDAKLQLSKDTYDDDLDNLLAQIGDQYADLFLAAKNLSDAILLSDILRVNTEITKAPLSASMIKRYDEHHQDLTLLKALVRQQLPEKYKEIFFDQSKNGYAGYIDGGASQEEFYKFIKPILEKMDGTEELLVKLNREDLLRKQRTFDNGSIPHQIHLGELHAILRRQEDFYPFLKDNREKIEKILTFRIPYYVGPLARGNSRFAWMTRKSEETITPWNFEEVVDKGASAQSFIERMTNFDKNLPNEKVLPKHSLLYEYFTVYNELTKVKYVTEGMRKPAFLSGEQKKAIVDLLFKTNRKVTVKQLKEDYFKKIECFDSVEISGVEDRFNASLGTYHDLLKIIKDKDFLDNEENEDILEDIVLTLTLFEDREMIEERLKTYAHLFDDKVMKQLKRRRYTGWGRLSRKLINGIRDKQSGKTILDFLKSDGFANRNFMQLIHDDSLTFKEDIQKAQVSGQGDSLHEHIANLAGSPAIKKGILQTVKVVDELVKVMGRHKPENIVIEMARENQTTQKGQKNSRERMKRIEEGIKELGSQILKEHPVENTQLQNEKLYLYYLQNGRDMYVDQELDINRLSDYDVDHIVPQSFLKDDSIDNKVLTRSDKNRGKSDNVPSEEVVKKMKNYWRQLLNAKLITQRKFDNLTKAERGGLSELDKAGFIKRQLVETRQITKHVAQILDSRMNTKYDENDKLIREVKVITLKSKLVSDFRKDFQFYKVREINNYHHAHDAYLNAVVGTALIKKYPKLESEFVYGDYKVYDVRKMIAKSEQEIGKATAKYFFYSNIMNFFKTEITLANGEIRKRPLIETNGETGEIVWDKGRDFATVRKVLSMPQVNIVKKTEVQTGGFSKESIRPKRNSDKLIARKKDWDPKKYGGFVSPTVAYSVLVVAKVEKGKSKKLKSVKELLGITIMERSSFEKNPIDFLEAKGYKEVKKDLIIKLPKYSLFELENGRKRMLASARFLQKGNELALPSKYVNFLYLASHYEKLKGSPEDNEQKQLFVEQHKHYLDEIIEQISEFSKRVILADANLDKVLSAYNKHRDKPIREQAENIIHLFTLTNLGAPRAFKYFDTTIDRKVYRSTKEVLDATLIHQSITGLYETRIDLSQLGGDSGGSGGSGGSTNLSDIIEKETGKQLVIQESILMLPEEVEEVIGNKPESDILVHTAYDESTDENVMLLTSDAPEYKPWALVIQDSNGENKIKMLSGGSGGSGGSTNLSDIIEKETGKQLVIQESILMLPEEVEEVIGNKPESDILVHTAYDESTDENVMLLTSDAPEYKPWALVIQDSNGENKIKMLSGGSKRTADGSEFEPKKKRKV

SEQ ID NO: 573 - protein, 1853 aa, synthetic construct
MKRTADGSEFESPKKKRKVSSETGPVAVDPTLRRRIEPHEFEVFFDPRELAAETCLLYEINWGGRHSIWRHTSQNTNKHVEVNFIEKFTTERYFCPNTRCSITWFLSWSPCGECSRAITEFLSRYPHVTLFIYIARLYHHADPRNRQGLRDLISSGVTIQIMTEQESGYCWRNFVNYSPSNEAHWPRYPHLWVRLYVLELYCIILGLPPCLNILRRKQPQLTFFTIALQSCHYQRLPPHILWATGLKSGGSSGGSSGSETPGTSESATPESSGGSSGGSDKKYSIGLAIGTNSVGWAVITDEYKVPSKKFKVLGNTDRHSIKKNLIGALLFDSGETAEATRLKRTARRRYTRRKNRICYLQEIFSNEMAKVDDSFFHRLEESFLVEEDKKHERHPIFGNIVDEVAYHEKYPTIYHLRKKLVDSTDKADLRLIYLALAHMIKFRGHFLIEGDLNPDNSDVDKLFIQLVQTYNQLFEENPINASGVDAKAILSARLSKSRRLENLIAQLPGEKKNGLFGNLIALSLGLTPNFKSNFDLAEDAKLQLSKDTYDDDLDNLLAQIGDQYADLFLAAKNLSDAILLSDILRVNTEITKAPLSASMIKRYDEHHQDLTLLKALVRQQLPEKYKEIFFDQSKNGYAGYIDGGASQEEFYKFIKPILEKMDGTEELLVKLNREDLLRKQRTFDNGSIPHQIHLGELHAILRRQEDFYPFLKDNREKIEKILTFRIPYYVGPLARGNSRFAWMTRKSEETITPWNFEEVVDKGASAQSFIERMTNFDKNLPNEKVLPKHSLLYEYFTVYNELTKVKYVTEGMRKPAFLSGEQKKAIVDLLFKTNRKVTVKQLKEDYFKKIECFDSVEISGVEDRFNASLGTYHDLLKIIKDKDFLDNEENEDILEDIVLTLTLFEDREMIEERLKTYAHLFDDKVMKQLKRRRYTGWGRLSRKLINGIRDKQSGKTILDFLKSDGFANRNFMQLIHDDSLTFKEDIQKAQVSGQGDSLHEHIANLAGSPAIKKGILQTVKVVDELVKVMGRHKPENIVIEMARENQTTQKGQKNSRERMKRIEEGIKELGSQILKEHPVENTQLQNEKLYLYYLQNGRDMYVDQELDINRLSDYDVDHIVPQSFLKDDSIDNKVLTRSDKNRGKSDNVPSEEVVKKMKNYWRQLLNAKLITQRKFDNLTKAERGGLSELDKAGFIKRQLVETRQITKHVAQILDSRMNTKYDENDKLIREVKVITLKSKLVSDFRKDFQFYKVREINNYHHAHDAYLNAVVGTALIKKYPKLESEFVYGDYKVYDVRKMIAKSEQEIGKATAKYFFYSNIMNFFKTEITLANGEIRKRPLIETNGETGEIVWDKGRDFATVRKVLSMPQVNIVKKTEVQTGGFSKESIRPKRNSDKLIARKKDWDPKKYGGFVSPTVAYSVLVVAKVEKGKSKKLKSVKELLGITIMERSSFEKNPIDFLEAKGYKEVKKDLIIKLPKYSLFELENGRKRMLASARFLQKGNELALPSKYVNFLYLASHYEKLKGSPEDNEQKQLFVEQHKHYLDEIIEQISEFSKRVILADANLDKVLSAYNKHRDKPIREQAENIIHLFTLTNLGAPRAFKYFDTTIDRKVYRSTKEVLDATLIHQSITGLYETRIDLSQLGGDSGGSGGSGGSTNLSDIIEKETGKQLVIQESILMLPEEVEEVIGNKPESDILVHTAYDESTDENVMLLTSDAPEYKPWALVIQDSNGENKIKMLSGGSGGSGGSTNLSDIIEKETGKQLVIQESILMLPEEVEEVIGNKPESDILVHTAYDESTDENVMLLTSDAPEYKPWALVIQDSNGENKIKMLSGGSKRTADGSEFEPKKKRKV

SEQ ID NO: 574 - protein, 1874 aa, synthetic construct
MKRTADGSEFESPKKKRKVSSETGPVAVDPTLRRRIEPHEFEVFFDPRELRKETCLLYEINWGGRHSIWRHTSQNTNKHVEVNFIEKFTTERYFCPNTRCSITWFLSYSPCGECSRAITEFLSRYPHVTLFIYIARLYHHADPENRQGLRDLISSGVTIQIMTEQESGYCWRNFVNYSPSNEAHWPRYPHLWVRLYVLELYCIILGLPPCLNILRRKQPQLTFFTIALQSCHYQRLPPHILWATGLKSGGSSGGSSGSETPGTSESATPESSGGSSGGSEIGKATAKYFFYSNIMNFFKTEITLANGEIRKRPLIETNGETGEIVWDKGRDFATVRKVLSMPQVNIVKKTEVQTGGFSKESILPKRNSDKLIARKKDWDPKKYGGFDSPTVAYSVLVVAKVEKGKSKKLKSVKELLGITIMERSSFEKNPIDFLEAKGYKEVKKDLIIKLPKYSLFELENGRKRMLASAGELQKGNELALPSKYVNFLYLASHYEKLKGSPEDNEQKQLFVEQHKHYLDEIIEQISEFSKRVILADANLDKVLSAYNKHRDKPIREQAENIIHLFTLTNLGAPAAFKYFDTTIDRKRYTSTKEVLDATLIHQSITGLYETRIDLSQLGGDGGSGGSGGSGGSGGSGGSGGMDKKYSIGLAIGTNSVGWAVITDEYKVPSKKFKVLGNTDRHSIKKNLIGALLFDSGETAEATRLKRTARRRYTRRKNRICYLQEIFSNEMAKVDDSFFHRLEESFLVEEDKKHERHPIFGNIVDEVAYHEKYPTIYHLRKKLVDSTDKADLRLIYLALAHMIKFRGHFLIEGDLNPDNSDVDKLFIQLVQTYNQLFEENPINASGVDAKAILSARLSKSRRLENLIAQLPGEKKNGLFGNLIALSLGLTPNFKSNFDLAEDAKLQLSKDTYDDDLDNLLAQIGDQYADLFLAAKNLSDAILLSDILRVNTEITKAPLSASMIKRYDEHHQDLTLLKALVRQQLPEKYKEIFFDQSKNGYAGYIDGGASQEEFYKFIKPILEKMDGTEELLVKLNREDLLRKQRTFDNGSIPHQIHLGELHAILRRQEDFYPFLKDNREKIEKILTFRIPYYVGPLARGNSRFAWMTRKSEETITPWNFEEVVDKGASAQSFIERMTNFDKNLPNEKVLPKHSLLYEYFTVYNELTKVKYVTEGMRKPAFLSGEQKKAIVDLLFKTNRKVTVKQLKEDYFKKIECFDSVEISGVEDRFNASLGTYHDLLKIIKDKDFLDNEENEDILEDIVLTLTLFEDREMIEERLKTYAHLFDDKVMKQLKRRRYTGWGRLSRKLINGIRDKQSGKTILDFLKSDGFANRNFMQLIHDDSLTFKEDIQKAQVSGQGDSLHEHIANLAGSPAIKKGILQTVKVVDELVKVMGRHKPENIVIEMARENQTTQKGQKNSRERMKRIEEGIKELGSQILKEHPVENTQLQNEKLYLYYLQNGRDMYVDQELDINRLSDYDVDHIVPQSFLKDDSIDNKVLTRSDKNRGKSDNVPSEEVVKKMKNYWRQLLNAKLITQRKFDNLTKAERGGLSELDKAGFIKRQLVETRQITKHVAQILDSRMNTKYDENDKLIREVKVITLKSKLVSDFRKDFQFYKVREINNYHHAHDAYLNAVVGTALIKKYPKLESEFVYGDYKVYDVRKMIAKSEQSGGSGGSGGSTNLSDIIEKETGKQLVIQESILMLPEEVEEVIGNKPESDILVHTAYDESTDENVMLLTSDAPEYKPWALVIQDSNGENKIKMLSGGSGGSGGSTNLSDIIEKETGKQLVIQESILMLPEEVEEVIGNKPESDILVHTAYDESTDENVMLLTSDAPEYKPWALVIQDSNGENKIKMLSGGSKRTADGSEFEPKKKRKV

SEQ ID NO: 575 - protein, 1874 aa, synthetic construct
MKRTADGSEFESPKKKRKVSSETGPVAVDPTLRRRIEPHEFEVFFDPRELRKETCLLYEINWGGRHSIWRHTSQNTNKHVEVNFIEKFTTERYFCPNTRCSITWFLSYSPCGECSRAITEFLSRYPHVTLFIYIARLYHHADPRNRQGLEDLISSGVTIQIMTEQESGYCWRNFVNYSPSNEAHWPRYPHLWVRLYVLELYCIILGLPPCLNILRRKQPQLTFFTIALQSCHYQRLPPHILWATGLKSGGSSGGSSGSETPGTSESATPESSGGSSGGSEIGKATAKYFFYSNIMNFFKTEITLANGEIRKRPLIETNGETGEIVWDKGRDFATVRKVLSMPQVNIVKKTEVQTGGFSKESILPKRNSDKLIARKKDWDPKKYGGFDSPTVAYSVLVVAKVEKGKSKKLKSVKELLGITIMERSSFEKNPIDFLEAKGYKEVKKDLIIKLPKYSLFELENGRKRMLASAGELQKGNELALPSKYVNFLYLASHYEKLKGSPEDNEQKQLFVEQHKHYLDEIIEQISEFSKRVILADANLDKVLSAYNKHRDKPIREQAENIIHLFTLTNLGAPAAFKYFDTTIDRKRYTSTKEVLDATLIHQSITGLYETRIDLSQLGGDGGSGGSGGSGGSGGSGGSGGMDKKYSIGLAIGTNSVGWAVITDEYKVPSKKFKVLGNTDRHSIKKNLIGALLFDSGETAEATRLKRTARRRYTRRKNRICYLQEIFSNEMAKVDDSFFHRLEESFLVEEDKKHERHPIFGNIVDEVAYHEKYPTIYHLRKKLVDSTDKADLRLIYLALAHMIKFRGHFLIEGDLNPDNSDVDKLFIQLVQTYNQLFEENPINASGVDAKAILSARLSKSRRLENLIAQLPGEKKNGLFGNLIALSLGLTPNFKSNFDLAEDAKLQLSKDTYDDDLDNLLAQIGDQYADLFLAAKNLSDAILLSDILRVNTEITKAPLSASMIKRYDEHHQDLTLLKALVRQQLPEKYKEIFFDQSKNGYAGYIDGGASQEEFYKFIKPILEKMDGTEELLVKLNREDLLRKQRTFDNGSIPHQIHLGELHAILRRQEDFYPFLKDNREKIEKILTFRIPYYVGPLARGNSRFAWMTRKSEETITPWNFEEVVDKGASAQSFIERMTNFDKNLPNEKVLPKHSLLYEYFTVYNELTKVKYVTEGMRKPAFLSGEQKKAIVDLLFKTNRKVTVKQLKEDYFKKIECFDSVEISGVEDRFNASLGTYHDLLKIIKDKDFLDNEENEDILEDIVLTLTLFEDREMIEERLKTYAHLFDDKVMKQLKRRRYTGWGRLSRKLINGIRDKQSGKTILDFLKSDGFANRNFMQLIHDDSLTFKEDIQKAQVSGQGDSLHEHIANLAGSPAIKKGILQTVKVVDELVKVMGRHKPENIVIEMARENQTTQKGQKNSRERMKRIEEGIKELGSQILKEHPVENTQLQNEKLYLYYLQNGRDMYVDQELDINRLSDYDVDHIVPQSFLKDDSIDNKVLTRSDKNRGKSDNVPSEEVVKKMKNYWRQLLNAKLITQRKFDNLTKAERGGLSELDKAGFIKRQLVETRQITKHVAQILDSRMNTKYDENDKLIREVKVITLKSKLVSDFRKDFQFYKVREINNYHHAHDAYLNAVVGTALIKKYPKLESEFVYGDYKVYDVRKMIAKSEQSGGSGGSGGSTNLSDIIEKETGKQLVIQESILMLPEEVEEVIGNKPESDILVHTAYDESTDENVMLLTSDAPEYKPWALVIQDSNGENKIKMLSGGSGGSGGSTNLSDIIEKETGKQLVIQESILMLPEEVEEVIGNKPESDILVHTAYDESTDENVMLLTSDAPEYKPWALVIQDSNGENKIKMLSGGSKRTADGSEFEPKKKRKV

SEQ ID NO: 576 - protein, 1874 aa, synthetic construct
MKRTADGSEFESPKKKRKVSSETGPVAVDPTLRRRIEPHEFEVFFDPRELRKETCLLYEINWGGRHSIWRHTSQNTNKHVEVNFIEKFTTERYFCPNTRCSITWFLSYSPCGECSRAITEFLSRYPHVTLFIYIARLYHHADPENRQGLEDLISSGVTIQIMTEQESGYCWRNFVNYSPSNEAHWPRYPHLWVRLYVLELYCIILGLPPCLNILRRKQPQLTFFTIALQSCHYQRLPPHILWATGLKSGGSSGGSSGSETPGTSESATPESSGGSSGGSEIGKATAKYFFYSNIMNFFKTEITLANGEIRKRPLIETNGETGEIVWDKGRDFATVRKVLSMPQVNIVKKTEVQTGGFSKESILPKRNSDKLIARKKDWDPKKYGGFDSPTVAYSVLVVAKVEKGKSKKLKSVKELLGITIMERSSFEKNPIDFLEAKGYKEVKKDLIIKLPKYSLFELENGRKRMLASAGELQKGNELALPSKYVNFLYLASHYEKLKGSPEDNEQKQLFVEQHKHYLDEIIEQISEFSKRVILADANLDKVLSAYNKHRDKPIREQAENIIHLFTLTNLGAPAAFKYFDTTIDRKRYTSTKEVLDATLIHQSITGLYETRIDLSQLGGDGGSGGSGGSGGSGGSGGSGGMDKKYSIGLAIGTNSVGWAVITDEYKVPSKKFKVLGNTDRHSIKKNLIGALLFDSGETAEATRLKRTARRRYTRRKNRICYLQEIFSNEMAKVDDSFFHRLEESFLVEEDKKHERHPIFGNIVDEVAYHEKYPTIYHLRKKLVDSTDKADLRLIYLALAHMIKFRGHFLIEGDLNPDNSDVDKLFIQLVQTYNQLFEENPINASGVDAKAILSARLSKSRRLENLIAQLPGEKKNGLFGNLIALSLGLTPNFKSNFDLAEDAKLQLSKDTYDDDLDNLLAQIGDQYADLFLAAKNLSDAILLSDILRVNTEITKAPLSASMIKRYDEHHQDLTLLKALVRQQLPEKYKEIFFDQSKNGYAGYIDGGASQEEFYKFIKPILEKMDGTEELLVKLNREDLLRKQRTFDNGSIPHQIHLGELHAILRRQEDFYPFLKDNREKIEKILTFRIPYYVGPLARGNSRFAWMTRKSEETITPWNFEEVVDKGASAQSFIERMTNFDKNLPNEKVLPKHSLLYEYFTVYNELTKVKYVTEGMRKPAFLSGEQKKAIVDLLFKTNRKVTVKQLKEDYFKKIECFDSVEISGVEDRFNASLGTYHDLLKIIKDKDFLDNEENEDILEDIVLTLTLFEDREMIEERLKTYAHLFDDKVMKQLKRRRYTGWGRLSRKLINGIRDKQSGKTILDFLKSDGFANRNFMQLIHDDSLTFKEDIQKAQVSGQGDSLHEHIANLAGSPAIKKGILQTVKVVDELVKVMGRHKPENIVIEMARENQTTQKGQKNSRERMKRIEEGIKELGSQILKEHPVENTQLQNEKLYLYYLQNGRDMYVDQELDINRLSDYDVDHIVPQSFLKDDSIDNKVLTRSDKNRGKSDNVPSEEVVKKMKNYWRQLLNAKLITQRKFDNLTKAERGGLSELDKAGFIKRQLVETRQITKHVAQILDSRMNTKYDENDKLIREVKVITLKSKLVSDFRKDFQFYKVREINNYHHAHDAYLNAVVGTALIKKYPKLESEFVYGDYKVYDVRKMIAKSEQSGGSGGSGGSTNLSDIIEKETGKQLVIQESILMLPEEVEEVIGNKPESDILVHTAYDESTDENVMLLTSDAPEYKPWALVIQDSNGENKIKMLSGGSGGSGGSTNLSDIIEKETGKQLVIQESILMLPEEVEEVIGNKPESDILVHTAYDESTDENVMLLTSDAPEYKPWALVIQDSNGENKIKMLSGGSKRTADGSEFEPKKKRKV

SEQ ID NO: 577 - protein, 1874 aa, synthetic construct
MKRTADGSEFESPKKKRKVSSETGPVAVDPTLRRRIEPHEFEVFFDPRELRKETCLLYEINWGGRHSIWRHTSQNTNKHVEVNFIEKFTTERYFCPNTRCSITWFLSWSPCGECSRAITEFLSRYPHVTLFIYIARLYHHADPENRQGLEDLISSGVTIQIMTEQESGYCWRNFVNYSPSNEAHWPRYPHLWVRLYVLELYCIILGLPPCLNILRRKQPQLTFFTIALQSCHYQRLPPHILWATGLKSGGSSGGSSGSETPGTSESATPESSGGSSGGSEIGKATAKYFFYSNIMNFFKTEITLANGEIRKRPLIETNGETGEIVWDKGRDFATVRKVLSMPQVNIVKKTEVQTGGFSKESILPKRNSDKLIARKKDWDPKKYGGFDSPTVAYSVLVVAKVEKGKSKKLKSVKELLGITIMERSSFEKNPIDFLEAKGYKEVKKDLIIKLPKYSLFELENGRKRMLASAGELQKGNELALPSKYVNFLYLASHYEKLKGSPEDNEQKQLFVEQHKHYLDEIIEQISEFSKRVILADANLDKVLSAYNKHRDKPIREQAENIIHLFTLTNLGAPAAFKYFDTTIDRKRYTSTKEVLDATLIHQSITGLYETRIDLSQLGGDGGSGGSGGSGGSGGSGGSGGMDKKYSIGLAIGTNSVGWAVITDEYKVPSKKFKVLGNTDRHSIKKNLIGALLFDSGETAEATRLKRTARRRYTRRKNRICYLQEIFSNEMAKVDDSFFHRLEESFLVEEDKKHERHPIFGNIVDEVAYHEKYPTIYHLRKKLVDSTDKADLRLIYLALAHMIKFRGHFLIEGDLNPDNSDVDKLFIQLVQTYNQLFEENPINASGVDAKAILSARLSKSRRLENLIAQLPGEKKNGLFGNLIALSLGLTPNFKSNFDLAEDAKLQLSKDTYDDDLDNLLAQIGDQYADLFLAAKNLSDAILLSDILRVNTEITKAPLSASMIKRYDEHHQDLTLLKALVRQQLPEKYKEIFFDQSKNGYAGYIDGGASQEEFYKFIKPILEKMDGTEELLVKLNREDLLRKQRTFDNGSIPHQIHLGELHAILRRQEDFYPFLKDNREKIEKILTFRIPYYVGPLARGNSRFAWMTRKSEETITPWNFEEVVDKGASAQSFIERMTNFDKNLPNEKVLPKHSLLYEYFTVYNELTKVKYVTEGMRKPAFLSGEQKKAIVDLLFKTNRKVTVKQLKEDYFKKIECFDSVEISGVEDRFNASLGTYHDLLKIIKDKDFLDNEENEDILEDIVLTLTLFEDREMIEERLKTYAHLFDDKVMKQLKRRRYTGWGRLSRKLINGIRDKQSGKTILDFLKSDGFANRNFMQLIHDDSLTFKEDIQKAQVSGQGDSLHEHIANLAGSPAIKKGILQTVKVVDELVKVMGRHKPENIVIEMARENQTTQKGQKNSRERMKRIEEGIKELGSQILKEHPVENTQLQNEKLYLYYLQNGRDMYVDQELDINRLSDYDVDHIVPQSFLKDDSIDNKVLTRSDKNRGKSDNVPSEEVVKKMKNYWRQLLNAKLITQRKFDNLTKAERGGLSELDKAGFIKRQLVETRQITKHVAQILDSRMNTKYDENDKLIREVKVITLKSKLVSDFRKDFQFYKVREINNYHHAHDAYLNAVVGTALIKKYPKLESEFVYGDYKVYDVRKMIAKSEQSGGSGGSGGSTNLSDIIEKETGKQLVIQESILMLPEEVEEVIGNKPESDILVHTAYDESTDENVMLLTSDAPEYKPWALVIQDSNGENKIKMLSGGSGGSGGSTNLSDIIEKETGKQLVIQESILMLPEEVEEVIGNKPESDILVHTAYDESTDENVMLLTSDAPEYKPWALVIQDSNGENKIKMLSGGSKRTADGSEFEPKKKRKV

SEQ ID NO: 578 - protein, 1874 aa, synthetic construct
MKRTADGSEFESPKKKRKVSSETGPVAVDPTLRRRIEPHEFEVFFDPRELAAETCLLYEINWGGRHSIWRHTSQNTNKHVEVNFIEKFTTERYFCPNTRCSITWFLSWSPCGECSRAITEFLSRYPHVTLFIYIARLYHHADPRNRQGLRDLISSGVTIQIMTEQESGYCWRNFVNYSPSNEAHWPRYPHLWVRLYVLELYCIILGLPPCLNILRRKQPQLTFFTIALQSCHYQRLPPHILWATGLKSGGSSGGSSGSETPGTSESATPESSGGSSGGSEIGKATAKYFFYSNIMNFFKTEITLANGEIRKRPLIETNGETGEIVWDKGRDFATVRKVLSMPQVNIVKKTEVQTGGFSKESILPKRNSDKLIARKKDWDPKKYGGFDSPTVAYSVLVVAKVEKGKSKKLKSVKELLGITIMERSSFEKNPIDFLEAKGYKEVKKDLIIKLPKYSLFELENGRKRMLASAGELQKGNELALPSKYVNFLYLASHYEKLKGSPEDNEQKQLFVEQHKHYLDEIIEQISEFSKRVILADANLDKVLSAYNKHRDKPIREQAENIIHLFTLTNLGAPAAFKYFDTTIDRKRYTSTKEVLDATLIHQSITGLYETRIDLSQLGGDGGSGGSGGSGGSGGSGGSGGMDKKYSIGLAIGTNSVGWAVITDEYKVPSKKFKVLGNTDRHSIKKNLIGALLFDSGETAEATRLKRTARRRYTRRKNRICYLQEIFSNEMAKVDDSFFHRLEESFLVEEDKKHERHPIFGNIVDEVAYHEKYPTIYHLRKKLVDSTDKADLRLIYLALAHMIKFRGHFLIEGDLNPDNSDVDKLFIQLVQTYNQLFEENPINASGVDAKAILSARLSKSRRLENLIAQLPGEKKNGLFGNLIALSLGLTPNFKSNFDLAEDAKLQLSKDTYDDDLDNLLAQIGDQYADLFLAAKNLSDAILLSDILRVNTEITKAPLSASMIKRYDEHHQDLTLLKALVRQQLPEKYKEIFFDQSKNGYAGYIDGGASQEEFYKFIKPILEKMDGTEELLVKLNREDLLRKQRTFDNGSIPHQIHLGELHAILRRQEDFYPFLKDNREKIEKILTFRIPYYVGPLARGNSRFAWMTRKSEETITPWNFEEVVDKGASAQSFIERMTNFDKNLPNEKVLPKHSLLYEYFTVYNELTKVKYVTEGMRKPAFLSGEQKKAIVDLLFKTNRKVTVKQLKEDYFKKIECFDSVEISGVEDRFNASLGTYHDLLKIIKDKDFLDNEENEDILEDIVLTLTLFEDREMIEERLKTYAHLFDDKVMKQLKRRRYTGWGRLSRKLINGIRDKQSGKTILDFLKSDGFANRNFMQLIHDDSLTFKEDIQKAQVSGQGDSLHEHIANLAGSPAIKKGILQTVKVVDELVKVMGRHKPENIVIEMARENQTTQKGQKNSRERMKRIEEGIKELGSQILKEHPVENTQLQNEKLYLYYLQNGRDMYVDQELDINRLSDYDVDHIVPQSFLKDDSIDNKVLTRSDKNRGKSDNVPSEEVVKKMKNYWRQLLNAKLITQRKFDNLTKAERGGLSELDKAGFIKRQLVETRQITKHVAQILDSRMNTKYDENDKLIREVKVITLKSKLVSDFRKDFQFYKVREINNYHHAHDAYLNAVVGTALIKKYPKLESEFVYGDYKVYDVRKMIAKSEQSGGSGGSGGSTNLSDIIEKETGKQLVIQESILMLPEEVEEVIGNKPESDILVHTAYDESTDENVMLLTSDAPEYKPWALVIQDSNGENKIKMLSGGSGGSGGSTNLSDIIEKETGKQLVIQESILMLPEEVEEVIGNKPESDILVHTAYDESTDENVMLLTSDAPEYKPWALVIQDSNGENKIKMLSGGSKRTADGSEFEPKKKRKV

SEQ ID NO: 579 - protein, 229 aa, Rattus sp. [sequence omitted]

SEQ ID NO: 580 - protein, 236 aa, Homo sapiens; identical to SEQ ID NO: 48

SEQ ID NO: 581 - protein, 200 aa, Homo sapiens
MSEASPASGPRHLMDPHIFTSNFNNGIGRHKTYLCYEVERLDNGTSVKMDQHRGFLHNQAKNLLCGFYGRHAELRFLDLVPSLQLDPAQIYRVTWFISWSPCFSWGCAGEVRAFLQENTHVRLRIFAARIYDYDPLYKEALQMLRDAGAQVSIMTYDEFKHCWDTFVDHQGCPFQPWDGLDEHSQALSGRLRAILQNQGN

SEQ ID NO: 582 - protein, 382 aa, Homo sapiens; identical to SEQ ID NO: 37

SEQ ID NO: 583 - protein, 384 aa, Homo sapiens; identical to SEQ ID NO: 36

SEQ ID NO: 584 - protein, 199 aa, synthetic construct
MEASPASGPRHLMDPHIFTSNFNNGIGRHKTYLCYEVERLDNGTSVKMDQHRGFLHGQAKNLLCGFYGRHAELRFLDLVPSLQLDPAQIYRVTWFISWSPCFSWGCAGEVRAFLQENTHVRLRIFAARIYDYDPLYKEALQMLRDAGAQVSIMTYDEFKHCWDTFVDHQGCPFQPWDGLDEHSQALSGRLRAILQNQGN

SEQ ID NO: 585 - protein, 208 aa, synthetic construct
MTDAEYVRIHEKLDIYTFKKQFSNNKKSVSHRCYVLFELKRRGERRACFWGYAVNKPQSGTERGIHAEIFSIRKVEEYLRDNPGQFTINWYSSWSPCADCAEKILEWYNQELRGNGHTLKIWVCKLYYEKNARNQIGLWNLRDNGVGLNVMVSEHYQCCRKIFIQSSHNQLNENRWLEKTLKRAEKRRSELSIMFQVKILHTTKSPAV

SEQ ID NO: 586 - protein, 229 aa, synthetic construct
MSSKTGPVAVDPTLRRRIEPHEFEVFFDPRELRKETCLLYEINWGGRHSIWRHTSQNTNKHVEVNFIEKFTTERYFCPNTRCSITWFLSWSPCGECSRAITEFLSRYPNVTLFIYIARLYHLANPRNRQGLRDLISSGVTIQIMTEQESGYCWHNFVNYSPSNESHWPRYPHLWVRLYVLELYCIILGLPPCLNILRRKQSQLTSFTIALQSCHYQRLPPHILWATGLK

SEQ ID NO: 587 - protein, 229 aa, synthetic construct
MSSETGPVAVDPTLRRRIEPHEFEVFFDPRELRKETCLLYEINWGGRHSIWRHTSQNTNKHVEVNFIEKFTTERYFCPNTRCSITWFLSYSPCGECSRAITEFLSRYPHVTLFIYIARLYHHADPENRQGLRDLISSGVTIQIMTEQESGYCWRNFVNYSPSNEAHWPRYPHLWVRLYVLELYCIILGLPPCLNILRRKQPQLTFFTIALQSCHYQRLPPHILWATGLK

SEQ ID NO: 588 - protein, 229 aa, synthetic construct
MSSETGPVAVDPTLRRRIEPHEFEVFFDPRELRKETCLLYEINWGGRHSIWRHTSQNTNKHVEVNFIEKFTTERYFCPNTRCSITWFLSYSPCGECSRAITEFLSRYPHVTLFIYIARLYHHADPRNRQGLEDLISSGVTIQIMTEQESGYCWRNFVNYSPSNEAHWPRYPHLWVRLYVLELYCIILGLPPCLNILRRKQPQLTFFTIALQSCHYQRLPPHILWATGLK

SEQ ID NO: 589 - protein, 229 aa, synthetic construct
MSSETGPVAVDPTLRRRIEPHEFEVFFDPRELRKETCLLYEINWGGRHSIWRHTSQNTNKHVEVNFIEKFTTERYFCPNTRCSITWFLSYSPCGECSRAITEFLSRYPHVTLFIYIARLYHHADPENRQGLEDLISSGVTIQIMTEQESGYCWRNFVNYSPSNEAHWPRYPHLWVRLYVLELYCIILGLPPCLNILRRKQPQLTFFTIALQSCHYQRLPPHILWATGLK

SEQ ID NO: 590 - protein, 229 aa, synthetic construct
MSSETGPVAVDPTLRRRIEPHEFEVFFDPRELRKETCLLYEINWGGRHSIWRHTSQNTNKHVEVNFIEKFTTERYFCPNTRCSITWFLSWSPCGECSRAITEFLSRYPHVTLFIYIARLYHHADPENRQGLEDLISSGVTIQIMTEQESGYCWRNFVNYSPSNEAHWPRYPHLWVRLYVLELYCIILGLPPCLNILRRKQPQLTFFTIALQSCHYQRLPPHILWATGLK

SEQ ID NO: 591 - protein, 229 aa, synthetic construct
MSSETGPVAVDPTLRRRIEPHEFEVFFDPRELAKETCLLYEINWGGRHSIWRHTSQNTNKHVEVNFIEKFTTERYFCPNTRCSITWFLSWSPCGECSRAITEFLSRYPHVTLFIYIARLYHHADPRNRQGLRDLISSGVTIQIMTEQESGYCWRNFVNYSPSNEAHWPRYPHLWVRLYVLELYCIILGLPPCLNILRRKQPQLTFFTIALQSCHYQRLPPHILWATGLK

SEQ ID NO: 592 - protein, 229 aa, synthetic construct
MSSETGPVAVDPTLRRRIEPHEFEVFFDPRELAAETCLLYEINWGGRHSIWRHTSQNTNKHVEVNFIEKFTTERYFCPNTRCSITWFLSWSPCGECSRAITEFLSRYPHVTLFIYIARLYHHADPRNRQGLRDLISSGVTIQIMTEQESGYCWRNFVNYSPSNEAHWPRYPHLWVRLYVLELYCIILGLPPCLNILRRKQPQLTFFTIALQSCHYQRLPPHILWATGLK

SEQ ID NO: 593 - protein, 229 aa, synthetic construct
MSSETGPVAVDPTLRRRIEPHEFEVFFDPRELAAETCLLYEINWGGRHSIWRHTSQNTNKHVEVNFIEKFTTERYFCPNTRCSITWFLSWSPCGECSRAITEFLSRYPHVTLFIYIARLYHLANPRNRQGLRDLISSGVTIQIMTEQESGYCWRNFVNYSPSNEAHWPRYPHLWVRLYVLELYCIILGLPPCLNILRRKQPQLTFFTIALQSCHYQRLPPHILWATGLK

SEQ ID NO: 594 - protein, 162 aa, synthetic construct
MFERNYDPRELRKETYLLYEIKWGKSGKLWRHWCQNNRTQHAEVYFLENIFNARRFNPSTHCSITWYLSWSPCAECSQKIVDFLKEHPNVNLEIYVARLYYHEDERNRQGLRDLVNSGVTIRIMDLPDYNYCWKTFVSDQGGDEDYWPGHFAPWIKQYSLKL

SEQ ID NO: 595 - protein, 162 aa, synthetic construct
MFERNYDPRELRKETYLLYEIKWGKSGKLWRHWCQNNRTQHAEVYFLENIFNARRFNPSTHCSITWYLSWSPCAECSQKIVDFLKEHPNVNLEIYVARLYYPENERNRQGLRDLVNSGVTIRIMDLPDYNYCWKTFVSDQGGDEDYWPGHFAPWIKQYSLKL

SEQ ID NO: 596 - skipped

SEQ ID NO: 597 - protein, 1853 aa, synthetic construct; identical to SEQ ID NO: 553

SEQ ID NO: 598 - protein, 1824 aa, synthetic construct
MSSETGPVAVDPTLRRRIEPHEFEVFFDPRELRKETCLLYEINWGGRHSIWRHTSQNTNKHVEVNFIEKFTTERYFCPNTRCSITWFLSWSPCGECSRAITEFLSRYPHVTLFIYIARLYHHADPRNRQGLRDLISSGVTIQIMTEQESGYCWRNFVNYSPSNEAHWPRYPHLWVRLYVLELYCIILGLPPCLNILRRKQPQLTFFTIALQSCHYQRLPPHILWATGLKSGGSSGGSSGSETPGTSESATPESSGGSSGGSDKKYSIGLAIGTNSVGWAVITDEYKVPSKKFKVLGNTDRHSIKKNLIGALLFDSGETAEATRLKRTARRRYTRRKNRICYLQEIFSNEMAKVDDSFFHRLEESFLVEEDKKHERHPIFGNIVDEVAYHEKYPTIYHLRKKLVDSTDKADLRLIYLALAHMIKFRGHFLIEGDLNPDNSDVDKLFIQLVQTYNQLFEENPINASGVDAKAILSARLSKSRRLENLIAQLPGEKKNGLFGNLIALSLGLTPNFKSNFDLAEDAKLQLSKDTYDDDLDNLLAQIGDQYADLFLAAKNLSDAILLSDILRVNTEITKAPLSASMIKRYDEHHQDLTLLKALVRQQLPEKYKEIFFDQSKNGYAGYIDGGASQEEFYKFIKPILEKMDGTEELLVKLNREDLLRKQRTFDNGSIPHQIHLGELHAILRRQEDFYPFLKDNREKIEKILTFRIPYYVGPLARGNSRFAWMTRKSEETITPWNFEEVVDKGASAQSFIERMTNFDKNLPNEKVLPKHSLLYEYFTVYNELTKVKYVTEGMRKPAFLSGEQKKAIVDLLFKTNRKVTVKQLKEDYFKKIECFDSVEISGVEDRFNASLGTYHDLLKIIKDKDFLDNEENEDILEDIVLTLTLFEDREMIEERLKTYAHLFDDKVMKQLKRRRYTGWGRLSRKLINGIRDKQSGKTILDFLKSDGFANRNFMQLIHDDSLTFKEDIQKAQVSGQGDSLHEHIANLAGSPAIKKGILQTVKVVDELVKVMGRHKPENIVIEMARENQTTQKGQKNSRERMKRIEEGIKELGSQILKEHPVENTQLQNEKLYLYYLQNGRDMYVDQELDINRLSDYDVDHIVPQSFLKDDSIDNKVLTRSDKNRGKSDNVPSEEVVKKMKNYWRQLLNAKLITQRKFDNLTKAERGGLSELDKAGFIKRQLVETRQITKHVAQILDSRMNTKYDENDKLIREVKVITLKSKLVSDFRKDFQFYKVREINNYHHAHDAYLNAVVGTALIKKYPKLESEFVYGDYKVYDVRKMIAKSEQEIGKATAKYFFYSNIMNFFKTEITLANGEIRKRPLIETNGETGEIVWDKGRDFATVRKVLSMPQVNIVKKTEVQTGGFSKESILPKRNSDKLIARKKDWDPKKYGGFDSPTVAYSVLVVAKVEKGKSKKLKSVKELLGITIMERSSFEKNPIDFLEAKGYKEVKKDLIIKLPKYSLFELENGRKRMLASAGELQKGNELALPSKYVNFLYLASHYEKLKGSPEDNEQKQLFVEQHKHYLDEIIEQISEFSKRVILADANLDKVLSAYNKHRDKPIREQAENIIHLFTLTNLGAPAAFKYFDTTIDRKRYTSTKEVLDATLIHQSITGLYETRIDLSQLGGDSGGSGGSGGSTNLSDIIEKETGKQLVIQESILMLPEEVEEVIGNKPESDILVHTAYDESTDENVMLLTSDAPEYKPWALVIQDSNGENKIKMLSGGSGGSGGSTNLSDIIEKETGKQLVIQESILMLPEEVEEVIGNKPESDILVHTAYDESTDENVMLLTSDAPEYKPWALVIQDSNGENKIKMLSGGSPKKKRK

SEQ ID NO: 599 - protein, 1838 aa, synthetic construct
MHHHHHHHHGSGGSGSSETGPVAVDPTLRRRIEPHEFEVFFDPRELRKETCLLYEINWGGRHSIWRHTSQNTNKHVEVNFIEKFTTERYFCPNTRCSITWFLSWSPCGECSRAITEFLSRYPHVTLFIYIARLYHHADPRNRQGLRDLISSGVTIQIMTEQESGYCWRNFVNYSPSNEAHWPRYPHLWVRLYVLELYCIILGLPPCLNILRRKQPQLTFFTIALQSCHYQRLPPHILWATGLKSGGSSGGSSGSETPGTSESATPESSGGSSGGSDKKYSIGLAIGTNSVGWAVITDEYKVPSKKFKVLGNTDRHSIKKNLIGALLFDSGETAEATRLKRTARRRYTRRKNRICYLQEIFSNEMAKVDDSFFHRLEESFLVEEDKKHERHPIFGNIVDEVAYHEKYPTIYHLRKKLVDSTDKADLRLIYLALAHMIKFRGHFLIEGDLNPDNSDVDKLFIQLVQTYNQLFEENPINASGVDAKAILSARLSKSRRLENLIAQLPGEKKNGLFGNLIALSLGLTPNFKSNFDLAEDAKLQLSKDTYDDDLDNLLAQIGDQYADLFLAAKNLSDAILLSDILRVNTEITKAPLSASMIKRYDEHHQDLTLLKALVRQQLPEKYKEIFFDQSKNGYAGYIDGGASQEEFYKFIKPILEKMDGTEELLVKLNREDLLRKQRTFDNGSIPHQIHLGELHAILRRQEDFYPFLKDNREKIEKILTFRIPYYVGPLARGNSRFAWMTRKSEETITPWNFEEVVDKGASAQSFIERMTNFDKNLPNEKVLPKHSLLYEYFTVYNELTKVKYVTEGMRKPAFLSGEQKKAIVDLLFKTNRKVTVKQLKEDYFKKIECFDSVEISGVEDRFNASLGTYHDLLKIIKDKDFLDNEENEDILEDIVLTLTLFEDREMIEERLKTYAHLFDDKVMKQLKRRRYTGWGRLSRKLINGIRDKQSGKTILDFLKSDGFANRNFMQLIHDDSLTFKEDIQKAQVSGQGDSLHEHIANLAGSPAIKKGILQTVKVVDELVKVMGRHKPENIVIEMARENQTTQKGQKNSRERMKRIEEGIKELGSQILKEHPVENTQLQNEKLYLYYLQNGRDMYVDQELDINRLSDYDVDHIVPQSFLKDDSIDNKVLTRSDKNRGKSDNVPSEEVVKKMKNYWRQLLNAKLITQRKFDNLTKAERGGLSELDKAGFIKRQLVETRQITKHVAQILDSRMNTKYDENDKLIREVKVITLKSKLVSDFRKDFQFYKVREINNYHHAHDAYLNAVVGTALIKKYPKLESEFVYGDYKVYDVRKMIAKSEQEIGKATAKYFFYSNIMNFFKTEITLANGEIRKRPLIETNGETGEIVWDKGRDFATVRKVLSMPQVNIVKKTEVQTGGFSKESILPKRNSDKLIARKKDWDPKKYGGFDSPTVAYSVLVVAKVEKGKSKKLKSVKELLGITIMERSSFEKNPIDFLEAKGYKEVKKDLIIKLPKYSLFELENGRKRMLASAGELQKGNELALPSKYVNFLYLASHYEKLKGSPEDNEQKQLFVEQHKHYLDEIIEQISEFSKRVILADANLDKVLSAYNKHRDKPIREQAENIIHLFTLTNLGAPAAFKYFDTTIDRKRYTSTKEVLDATLIHQSITGLYETRIDLSQLGGDSGGSGGSGGSTNLSDIIEKETGKQLVIQESILMLPEEVEEVIGNKPESDILVHTAYDESTDENVMLLTSDAPEYKPWALVIQDSNGENKIKMLSGGSGGSGGSTNLSDIIEKETGKQLVIQESILMLPEEVEEVIGNKPESDILVHTAYDESTDENVMLLTSDAPEYKPWALVIQDSNGENKIKMLSGGSPKKKRK

SEQ ID NO: 600 - protein, 1853 aa, synthetic construct; identical to SEQ ID NO: 553

SEQ ID NO: 601 - protein, 1853 aa, synthetic construct
MKRTADGSEFESPKKKRKVSSETGPVAVDPTLRRRIEPHEFEVFFDPRELRKETCLLYEIKWGTSHKIWRHSSKNTTKHVEVNFIEKFTSERHFCPSTSCSITWFLSWSPCGECSKAITEFLSQHPNVTLVIYVARLYHHMDQQNRQGLRDLVNSGVTIQIMTAPEYDYCWRNFVNYPPGKEAHWPRYPPLWMKLYALELHAGILGLPPCLNILRRKQPQLTFFTIALQSCHYQRLPPHILWATGLKSGGSSGGSSGSETPGTSESATPESSGGSSGGSDKKYSIGLAIGTNSVGWAVITDEYKVPSKKFKVLGNTDRHSIKKNLIGALLFDSGETAEATRLKRTARRRYTRRKNRICYLQEIFSNEMAKVDDSFFHRLEESFLVEEDKKHERHPIFGNIVDEVAYHEKYPTIYHLRKKLVDSTDKADLRLIYLALAHMIKFRGHFLIEGDLNPDNSDVDKLFIQLVQTYNQLFEENPINASGVDAKAILSARLSKSRRLENLIAQLPGEKKNGLFGNLIALSLGLTPNFKSNFDLAEDAKLQLSKDTYDDDLDNLLAQIGDQYADLFLAAKNLSDAILLSDILRVNTEITKAPLSASMIKRYDEHHQDLTLLKALVRQQLPEKYKEIFFDQSKNGYAGYIDGGASQEEFYKFIKPILEKMDGTEELLVKLNREDLLRKQRTFDNGSIPHQIHLGELHAILRRQEDFYPFLKDNREKIEKILTFRIPYYVGPLARGNSRFAWMTRKSEETITPWNFEEVVDKGASAQSFIERMTNFDKNLPNEKVLPKHSLLYEYFTVYNELTKVKYVTEGMRKPAFLSGEQKKAIVDLLFKTNRKVTVKQLKEDYFKKIECFDSVEISGVEDRFNASLGTYHDLLKIIKDKDFLDNEENEDILEDIVLTLTLFEDREMIEERLKTYAHLFDDKVMKQLKRRRYTGWGRLSRKLINGIRDKQSGKTILDFLKSDGFANRNFMQLIHDDSLTFKEDIQKAQVSGQGDSLHEHIANLAGSPAIKKGILQTVKVVDELVKVMGRHKPENIVIEMARENQTTQKGQKNSRERMKRIEEGIKELGSQILKEHPVENTQLQNEKLYLYYLQNGRDMYVDQELDINRLSDYDVDHIVPQSFLKDDSIDNKVLTRSDKNRGKSDNVPSEEVVKKMKNYWRQLLNAKLITQRKFDNLTKAERGGLSELDKAGFIKRQLVETRQITKHVAQILDSRMNTKYDENDKLIREVKVITLKSKLVSDFRKDFQFYKVREINNYHHAHDAYLNAVVGTALIKKYPKLESEFVYGDYKVYDVRKMIAKSEQEIGKATAKYFFYSNIMNFFKTEITLANGEIRKRPLIETNGETGEIVWDKGRDFATVRKVLSMPQVNIVKKTEVQTGGFSKESILPKRNSDKLIARKKDWDPKKYGGFDSPTVAYSVLVVAKVEKGKSKKLKSVKELLGITIMERSSFEKNPIDFLEAKGYKEVKKDLIIKLPKYSLFELENGRKRMLASAGELQKGNELALPSKYVNFLYLASHYEKLKGSPEDNEQKQLFVEQHKHYLDEIIEQISEFSKRVILADANLDKVLSAYNKHRDKPIREQAENIIHLFTLTNLGAPAAFKYFDTTIDRKRYTSTKEVLDATLIHQSITGLYETRIDLSQLGGDSGGSGGSGGSTNLSDIIEKETGKQLVIQESILMLPEEVEEVIGNKPESDILVHTAYDESTDENVMLLTSDAPEYKPWALVIQDSNGENKIKMLSGGSGGSGGSTNLSDIIEKETGKQLVIQESILMLPEEVEEVIGNKPESDILVHTAYDESTDENVMLLTSDAPEYKPWALVIQDSNGENKIKMLSGGSKRTADGSEFEPKKKRKV

SEQ ID NO: 602 - protein, 1853 aa, synthetic construct
MKRTADGSEFESPKKKRKVSSETGPVAVDPTLRRRIEPHEFEVFFDPRELRKEACLLYEIKWGTSHKIWRNSGKNTTKHVEVNFIEKFTSERHFCPSISCSITWFLSWSPCWECSKAIREFLSQHPNVTLVIYVARLFQHMDQQNRQGLRDLVNSGVTIQIMTASEYDHCWRNFVNYPPGKEAHWPRYPPLWMKLYALELHAGILGLPPCLNILRRKQPQLTFFTIALQSCHYQRLPPHILWATGLKSGGSSGGSSGSETPGTSESATPESSGGSSGGSDKKYSIGLAIGTNSVGWAVITDEYKVPSKKFKVLGNTDRHSIKKNLIGALLFDSGETAEATRLKRTARRRYTRRKNRICYLQEIFSNEMAKVDDSFFHRLEESFLVEEDKKHERHPIFGNIVDEVAYHEKYPTIYHLRKKLVDSTDKADLRLIYLALAHMIKFRGHFLIEGDLNPDNSDVDKLFIQLVQTYNQLFEENPINASGVDAKAILSARLSKSRRLENLIAQLPGEKKNGLFGNLIALSLGLTPNFKSNFDLAEDAKLQLSKDTYDDDLDNLLAQIGDQYADLFLAAKNLSDAILLSDILRVNTEITKAPLSASMIKRYDEHHQDLTLLKALVRQQLPEKYKEIFFDQSKNGYAGYIDGGASQEEFYKFIKPILEKMDGTEELLVKLNREDLLRKQRTFDNGSIPHQIHLGELHAILRRQEDFYPFLKDNREKIEKILTFRIPYYVGPLARGNSRFAWMTRKSEETITPWNFEEVVDKGASAQSFIERMTNFDKNLPNEKVLPKHSLLYEYFTVYNELTKVKYVTEGMRKPAFLSGEQKKAIVDLLFKTNRKVTVKQLKEDYFKKIECFDSVEISGVEDRFNASLGTYHDLLKIIKDKDFLDNEENEDILEDIVLTLTLFEDREMIEERLKTYAHLFDDKVMKQLKRRRYTGWGRLSRKLINGIRDKQSGKTILDFLKSDGFANRNFMQLIHDDSLTFKEDIQKAQVSGQGDSLHEHIANLAGSPAIKKGILQTVKVVDELVKVMGRHKPENIVIEMARENQTTQKGQKNSRERMKRIEEGIKELGSQILKEHPVENTQLQNEKLYLYYLQNGRDMYVDQELDINRLSDYDVDHIVPQSFLKDDSIDNKVLTRSDKNRGKSDNVPSEEVVKKMKNYWRQLLNAKLITQRKFDNLTKAERGGLSELDKAGFIKRQLVETRQITKHVAQILDSRMNTKYDENDKLIREVKVITLKSKLVSDFRKDFQFYKVREINNYHHAHDAYLNAVVGTALIKKYPKLESEFVYGDYKVYDVRKMIAKSEQEIGKATAKYFFYSNIMNFFKTEITLANGEIRKRPLIETNGETGEIVWDKGRDFATVRKVLSMPQVNIVKKTEVQTGGFSKESILPKRNSDKLIARKKDWDPKKYGGFDSPTVAYSVLVVAKVEKGKSKKLKSVKELLGITIMERSSFEKNPIDFLEAKGYKEVKKDLIIKLPKYSLFELENGRKRMLASAGELQKGNELALPSKYVNFLYLASHYEKLKGSPEDNEQKQLFVEQHKHYLDEIIEQISEFSKRVILADANLDKVLSAYNKHRDKPIREQAENIIHLFTLTNLGAPAAFKYFDTTIDRKRYTSTKEVLDATLIHQSITGLYETRIDLSQLGGDSGGSGGSGGSTNLSDIIEKETGKQLVIQESILMLPEEVEEVIGNKPESDILVHTAYDESTDENVMLLTSDAPEYKPWALVIQDSNGENKIKMLSGGSGGSGGSTNLSDIIEKETGKQLVIQESILMLPEEVEEVIGNKPESDILVHTAYDESTDENVMLLTSDAPEYKPWALVIQDSNGENKIKMLSGGSKRTADGSEFEPKKKRKV

SEQ ID NO: 603 - skipped

SEQ ID NO: 604 - DNA, 684 bp, Rattus sp.
  source 1..684: mol_type = other DNA
tcctcagagactgggcctgtcgccgtcgatccaaccctgcgccgccggattgaacctcacgagtttgaagtgttctttgacccccgggagctgagaaaggagacatgcctgctgtacgagatcaactggggaggcaggcactccatctggaggcacacctctcagaacacaaataagcacgtggaggtgaacttcatcgagaagtttaccacagagcggtacttctgccccaataccagatgtagcatcacatggtttctgagctggtccccttgcggagagtgtagcagggccatcaccgagttcctgtccagatatccacacgtgacactgtttatctacatcgccaggctgtatcaccacgcagacccaaggaataggcagggcctgcgcgatctgatcagctccggcgtgaccatccagatcatgacagagcaggagtccggctactgctggcggaacttcgtgaattattctcctagcaacgaggcccactggcctaggtacccacacctgtgggtgcgcctgtacgtgctggagctgtattgcatcatcctgggcctgcccccttgtctgaatatcctgcggagaaagcagccccagctgaccttctttacaatcgccctgcagtcttgtcactatcagaggctgccaccccacatcctgtgggccacaggcctgaag

SEQ ID NO: 605 - DNA, 686 bp, synthetic construct
  source 1..686: mol_type = other DNA
agcagtgaaaccggaccagtggcagtggacccaaccctgaggagacggattgagccccatgaatttgaagtgttctttgacccaagggagctgaggaaggagacatgcctgctgtacgagatcaagtggggcacaagccacaagatctggcgccacagctccaagaacaccacaaagcacgtggaagtgaatttcatcgagaagtttacctccgagcggcacttctgcccctctaccagctgttccatcacatggtttctgtcttggagcccttgcggcgagtgttccaaggccatcaccgagttcctgtctcagcaccctaacgtgaccctggtcatctacgtggcccggctgtatcaccacatggaccagcagaacaggcagggcctgcgcgatctggtgaattctggcgtgaccatccagatcatgacagccccagagtacgactattgctggcggaacttcgtgaattatccacctggcaaggaggcacactggccaagatacccacccctgtggatgaagctgtatgcactggagctgcacgcaggaatcctgggcctgcctccatgtctgaatatcctgcggagaaagcagccccagctgacatttttcaccattgctctgcagtcttgtcactatcagcggctgcctcctcatattctgtgggctacaggcctttgaaa

SEQ ID NO: 606 - DNA, 686 bp, synthetic construct
  source 1..686: mol_type = other DNA
tcatcagaaacaggaccagtcgccgtggacccaacactgaggagaaggattgagccccatgaatttgaagtctttttcgaccccagggagctgaggaaggaggcatgcctgctgtacgagatcaagtggggcacaagccacaagatctggcgcaacagcggcaagaacaccacaaagcacgtggaagtgaatttcatcgagaagtttacctccgagcggcacttctgcccctctatcagctgttccatcacatggtttctgtcttggagcccttgctgggagtgttccaaggccatccgcgagttcctgtctcagcaccctaacgtgaccctggtcatctacgtggcccggctgtttcaacacatggaccagcagaacaggcagggcctgcgcgatctggtgaattctggcgtgaccatccagatcatgacagcctcagagtacgaccattgctggcggaacttcgtgaattatccacctggcaaggaggcacactggccaagatacccacccctgtggatgaagctgtatgcactggagctgcacgcaggaatcctgggcctgcctccatgtctgaatatcctgcggagaaagcagccccagctgacatttttcactatcgcactgcagagctgtcattaccagagactgcctcctcatatcctgtgggctacaggcctttgaaa

SEQ ID NO: 607 - DNA, 686 bp, synthetic construct
  source 1..686: mol_type = other DNA
agcagcgagacaggacccgtggcagtggaccctacactgaggaggaggattgagcccgaatttttcaacaggaactacgaccccagagagctgcggaaggagacatacctgctgtatgagatcaagtggggcaaggagtccaagatctggcggcacacctctaacaatagaacacagcacgccgaggtgaacttcctggagaacttctttaatgagctgtactttaatccttctacccactgcagcatcacatggttcctgagctggtccccatgcggcgagtgttctaaggccatcgtggagtttctgaaggagcaccccaacgtgaatctggagatctacgtggccaggctgtatctgtgcgaggacgagaggaacaggcagggcctgcgggatctggtgaatagcggcgtgaccatcagaatcatgaacctgcctgactacaattattgttggcgcacattcgtgtcccaccagggaggcgacgaggattattggccaaggcactttgcaccatgggtgcgcctgtacgtgctggagctgtattgcatcatcctgggcctgcccccttgtctgaacatcctgcggagaaagcagccccagctgacattcttcaccatcgcactgcagagttgtcattaccagcgactgcctcctcatatcctgtgggctacaggcctttgaaa

SEQ ID NO: 608 - DNA, 686 bp, synthetic construct
  source 1..686: mol_type = other DNA
tcatcagagaccggacctgtggcagtggacccaaccctgcgacggagaatcgagcccttttactttcagttcaacaacgacccaagagcctgccggagaaagacctacctgtgctatgagctgaagcaggacggctctacctgggtgtggaagcggacactgcacaacaagggcagacacgccgagatctgcttcctggagaagatcagctccctggagaagctggaccctgcccagcactacaggatcacatggtatatgtcttggagcccatgctccaactgtgcccagaagatcgtggattttctgaaggagcacccacacgtgaatctgcggatctacgtggccagactgtactatcacgaggaggagaggtatcaggagggcctgaggaacctgaggcgctccggcgtgtctatcagagtgatggacctgcccgatttcgagcactgctgggagacattcgtggataacggaggaggacctttccagccatggcccggcctggaggagctgaatagcaagcagctgtcccggagactgcaggcaggaatcctgggcctgcccccttgtctgaatatcctgaggcgcaagcagccccagctgacatttttcaccatcgcactgcagagttgtcattatcagcgactgcctcctcatatcctgtgggctacaggcctttgaaa

SEQ ID NO: 609 - DNA, 686 bp, synthetic construct
  source 1..686: mol_type = other DNA
agcagcgagaccggacctgtggcagtggacccaaccctgagaagacgcattgagccatttcattttcagtttaacaacgaccccagagcctaccggagaaagacctacctgtgctatgagctgaagcaggacggctccacctgggtgctggatcggacactgagaaacaagggccggcacgccgagatctgtttcctggacaagatcaattcctgggagaggctggatcccgcccagcactaccgcgtgacatggtatatgagctggtccccttgctctaactgtgcccagcaggtggtggatttcctgaaggagcacccacacgtgaatctgcggatctttgccgccagactgtactatcacgagcagaggcgctatcaggagggcctgcggagcctgaggggaagcggagtgcctgtggccgtgatgaccctgccagacttcgagcactgctgggagacatttgtggatcacggcggccggccattccagccatgggacggcctggaggagctgaactctaggagcctgtcccggagactgcaggcaggaatcctgggcctgcccccttgtctgaatatcctgaggcgcaagcagccccagctgaccttttttaccatcgcactgcagagttgtcactaccagagactgcctcctcatatcctgtgggctacaggcctttgaaa

SEQ ID NO: 610 - DNA, 1368 bp, Rattus sp.
  source 1..1368: mol_type = other DNA
tcctcagagactgggcctgtcgccgtcgatccaaccctgcgccgccggattgaacctcacgagtttgaagtgttctttgacccccgggagctgagaaaggagacatgcctgctgtacgagatcaactggggaggcaggcactccatctggaggcacacctctcagaacacaaataagcacgtggaggtgaacttcatcgagaagtttaccacagagcggtacttctgccccaataccagatgtagcatcacatggtttctgagctggtccccttgcggagagtgtagcagggccatcaccgagttcctgtccagatatccacacgtgacactgtttatctacatcgccaggctgtatcaccacgcagacccaaggaataggcagggcctgcgcgatctgatcagctccggcgtgaccatccagatcatgacagagcaggagtccggctactgctggcggaacttcgtgaattattctcctagcaacgaggcccactggcctaggtacccacacctgtgggtgcgcctgtacgtgctggagctgtattgcatcatcctgggcctgcccccttgtctgaatatcctgcggagaaagcagccccagctgaccttctttacaatcgccctgcagtcttgtcactatcagaggctgccaccccacatcctgtgggccacaggcctgaagtcctcagagactgggcctgtcgccgtcgatccaaccctgcgccgccggattgaacctcacgagtttgaagtgttctttgacccccgggagctgagaaaggagacatgcctgctgtacgagatcaactggggaggcaggcactccatctggaggcacacctctcagaacacaaataagcacgtggaggtgaacttcatcgagaagtttaccacagagcggtacttctgccccaataccagatgtagcatcacatggtttctgagctggtccccttgcggagagtgtagcagggccatcaccgagttcctgtccagatatccacacgtgacactgtttatctacatcgccaggctgtatcaccacgcagacccaaggaataggcagggcctgcgcgatctgatcagctccggcgtgaccatccagatcatgacagagcaggagtccggctactgctggcggaacttcgtgaattattctcctagcaacgaggcccactggcctaggtacccacacctgtgggtgcgcctgtacgtgctggagctgtattgcatcatcctgggcctgcccccttgtctgaatatcctgcggagaaagcagccccagctgaccttctttacaatcgccctgcagtcttgtcactatcagaggctgccaccccacatcctgtgggccacaggcctgaag

SEQ ID NO: 611 - DNA, 684 bp, synthetic construct
  source 1..684: mol_type = other DNA
agcagtgaaaccggaccagtggcagtggacccaaccctgaggagacggattgagccccatgaatttgaagtgttctttgacccaagggagctgaggaaggagacatgcctgctgtacgagatcaagtggggcacaagccacaagatctggcgccacagctccaagaacaccacaaagcacgtggaagtgaatttcatcgagaagtttacctccgagcggcacttctgcccctctaccagctgttccatcacatggtttctgtcttggagcccttgcggcgagtgttccaaggccatcaccgagttcctgtctcagcaccctaacgtgaccctggtcatctacgtggcccggctgtatcaccacatggaccagcagaacaggcagggcctgcgcgatctggtgaattctggcgtgaccatccagatcatgacagccccagagtacgactattgctggcggaacttcgtgaattatccacctggcaaggaggcacactggccaagatacccacccctgtggatgaagctgtatgcactggagctgcacgcaggaatcctgggcctgcctccatgtctgaatatcctgcggagaaagcagccccagctgacatttttcaccattgctctgcagtcttgtcactatcagcggctgcctcctcatattctgtgggctacaggccttaaa

SEQ ID NO: 612 - DNA, 684 bp, synthetic construct
  source 1..684: mol_type = other DNA
tcatcagaaacaggaccagtcgccgtggacccaacactgaggagaaggattgagccccatgaatttgaagtctttttcgaccccagggagctgaggaaggaggcatgcctgctgtacgagatcaagtggggcacaagccacaagatctggcgcaacagcggcaagaacaccacaaagcacgtggaagtgaatttcatcgagaagtttacctccgagcggcacttctgcccctctatcagctgttccatcacatggtttctgtcttggagcccttgctgggagtgttccaaggccatccgcgagttcctgtctcagcaccctaacgtgaccctggtcatctacgtggcccggctgtttcaacacatggaccagcagaacaggcagggcctgcgcgatctggtgaattctggcgtgaccatccagatcatgacagcctcagagtacgaccattgctggcggaacttcgtgaattatccacctggcaaggaggcacactggccaagatacccacccctgtggatgaagctgtatgcactggagctgcacgcaggaatcctgggcctgcctccatgtctgaatatcctgcggagaaagcagccccagctgacatttttcactatcgcactgcagagctgtcattaccagagactgcctcctcatatcctgtgggctacaggccttaaa

SEQ ID NO: 613 - DNA, 684 bp, synthetic construct
  source 1..684: mol_type = other DNA
agcagcgagacaggacccgtggcagtggaccctacactgaggaggaggattgagcccgaatttttcaacaggaactacgaccccagagagctgcggaaggagacatacctgctgtatgagatcaagtggggcaaggagtccaagatctggcggcacacctctaacaatagaacacagcacgccgaggtgaacttcctggagaacttctttaatgagctgtactttaatccttctacccactgcagcatcacatggttcctgagctggtccccatgcggcgagtgttctaaggccatcgtggagtttctgaaggagcaccccaacgtgaatctggagatctacgtggccaggctgtatctgtgcgaggacgagaggaacaggcagggcctgcgggatctggtgaatagcggcgtgaccatcagaatcatgaacctgcctgactacaattattgttggcgcacattcgtgtcccaccagggaggcgacgaggattattggccaaggcactttgcaccatgggtgcgcctgtacgtgctggagctgtattgcatcatcctgggcctgcccccttgtctgaacatcctgcggagaaagcagccccagctgacattcttcaccatcgcactgcagagttgtcattaccagcgactgcctcctcatatcctgtgggctacaggccttaaa

SEQ ID NO: 614 - DNA, 684 bp, synthetic construct
  source 1..684: mol_type = other DNA
tcatcagagaccggacctgtggcagtggacccaaccctgcgacggagaatcgagcccttttactttcagttcaacaacgacccaagagcctgccggagaaagacctacctgtgctatgagctgaagcaggacggctctacctgggtgtggaagcggacactgcacaacaagggcagacacgccgagatctgcttcctggagaagatcagctccctggagaagctggaccctgcccagcactacaggatcacatggtatatgtcttggagcccatgctccaactgtgcccagaagatcgtggattttctgaaggagcacccacacgtgaatctgcggatctacgtggccagactgtactatcacgaggaggagaggtatcaggagggcctgaggaacctgaggcgctccggcgtgtctatcagagtgatggacctgcccgatttcgagcactgctgggagacattcgtggataacggaggaggacctttccagccatggcccggcctggaggagctgaatagcaagcagctgtcccggagactgcaggcaggaatcctgggcctgcccccttgtctgaatatcctgaggcgcaagcagccccagctgacatttttcaccatcgcactgcagagttgtcattatcagcgactgcctcctcatatcctgtgggctacaggccttaaa

SEQ ID NO: 615 - DNA, 684 bp, synthetic construct
  source 1..684: mol_type = other DNA
agcagcgagaccggacctgtggcagtggacccaaccctgagaagacgcattgagccatttcattttcagtttaacaacgaccccagagcctaccggagaaagacctacctgtgctatgagctgaagcaggacggctccacctgggtgctggatcggacactgagaaacaagggccggcacgccgagatctgtttcctggacaagatcaattcctgggagaggctggatcccgcccagcactaccgcgtgacatggtatatgagctggtccccttgctctaactgtgcccagcaggtggtggatttcctgaaggagcacccacacgtgaatctgcggatctttgccgccagactgtactatcacgagcagaggcgctatcaggagggcctgcggagcctgaggggaagcggagtgcctgtggccgtgatgaccctgccagacttcgagcactgctgggagacatttgtggatcacggcggccggccattccagccatgggacggcctggaggagctgaactctaggagcctgtcccggagactgcaggcaggaatcctgggcctgcccccttgtctgaatatcctgaggcgcaagcagccccagctgaccttttttaccatcgcactgcagagttgtcactaccagagactgcctcctcatatcctgtgggctacaggccttaaa

SEQ ID NO: 616 - DNA, 5559 bp, synthetic construct
  source 1..5559: mol_type = other DNA
atgaaacggacagccgacggaagcgagttcgagtcaccaaagaagaagcggaaagtctcctcagagactgggcctgtcgccgtcgatccaaccctgcgccgccggattgaacctcacgagtttgaagtgttctttgacccccgggagctgagaaaggagacatgcctgctgtacgagatcaactggggaggcaggcactccatctggaggcacacctctcagaacacaaataagcacgtggaggtgaacttcatcgagaagtttaccacagagcggtacttctgccccaataccagatgtagcatcacatggtttctgagctggtccccttgcggagagtgtagcagggccatcaccgagttcctgtccagatatccacacgtgacactgtttatctacatcgccaggctgtatcaccacgcagacccaaggaataggcagggcctgcgcgatctgatcagctccggcgtgaccatccagatcatgacagagcaggagtccggctactgctggcggaacttcgtgaattattctcctagcaacgaggcccactggcctaggtacccacacctgtgggtgcgcctgtacgtgctggagctgtattgcatcatcctgggcctgcccccttgtctgaatatcctgcggagaaagcagccccagctgaccttctttacaatcgccctgcagtcttgtcactatcagaggctgccaccccacatcctgtgggccacaggcctgaagtctggaggatctagcggaggatcctctggcagcgagacaccaggaacaagcgagtcagcaacaccagagagcagtggcggcagcagcggcggcagcgacaagaagtacagcatcggcctggacatcggcaccaactctgtgggctgggccgtgatcaccgacgagtacaaggtgcccagcaagaaattcaaggtgctgggcaacaccgaccggcacagcatcaagaagaacctgatcggagccctgctgttcgacagcggcgaaacagccgaggccacccggctgaagagaaccgccagaagaagatacaccagacggaagaaccggatctgctatctgcaagagatcttcagcaacgagatggccaaggtggacgacagcttcttccacagactggaagagtccttcctggtggaagaggataagaagcacgagcggcaccccatcttcggcaacatcgtggacgaggtggcctaccacgagaagtaccccaccatctaccacctgagaaagaaactggtggacagcaccgacaaggccgacctgcggctgatctatctggccctggcccacatgatcaagttccggggccacttcctgatcgagggcgacctgaaccccgacaacagcgacgtggacaagctgttcatccagctggtgcagacctacaaccagctgttcgaggaaaaccccatcaacgccagcggcgtggacgccaaggccatcctgtctgccagactgagcaagagcagacggctggaaaatctgatcgcccagctgcccggcgagaagaagaatggcctgttcggaaacctgattgccctgagcctgggcctgacccccaacttcaagagcaacttcgacctggccgaggatgccaaactgcagctgagcaaggacacctacgacgacgacctggacaacctgctggcccagatcggcgaccagtacgccgacctgtttctggccgccaagaacctgtccgacgccatcctgctgagcgacatcctgagagtgaacaccgagatcaccaaggcccccctgagcgcctctatgatcaagagatacgacgagcaccaccaggacctgaccctgctgaaagctctcgtgcggcagcagctgcctgagaagtacaaagagattttcttcgaccagagcaagaacggctacgccggctacattgacggcggagccagccaggaagagttctacaagttcatcaagcccatcctggaaaagatggacggcaccgaggaactgctcgtgaagctgaacagagaggacctgctgcggaagcagcggaccttcgacaacggcagcatcccccaccagatccacctgggagagctgcacgccattctgcggcggcaggaagatttttacccattcctgaaggacaaccgggaaaagatcgagaagatcctgaccttccgcatcccctactacgtgggccctctggccaggggaaacagcagattcgcctggatgaccagaaagagcgaggaaaccatcaccccctggaacttcgaggaagtggtggacaagggcgcttccgcccagagcttcatcgagcggatgaccaacttcgataagaacctgcccaacgagaaggtgctgcccaagcacagcctgctgtacgagtacttcaccgtgtataacgagctgaccaaagtgaaatacgtgaccgagggaatgagaaagcccgccttcctgagcggcgagcagaaaaaggccatcgtggacctgctgttcaagaccaaccggaaagtgaccgtgaagcagctgaaagaggactacttcaagaaaatcgagtgcttcgactccgtggaaatctccggcgtggaagatcggttcaacgcctccctgggcacataccacgatctgctgaaaattatcaaggacaaggacttcctggacaatgaggaaaacgaggacattctggaagatatcgtgctgaccctgacactgtttgaggacagagagatgatcgaggaacggctgaaaacctatgcccacctgttcgacgacaaagtgatgaagcagctgaagcggcggagatacaccggctggggcaggctgagccggaagctgatcaacggcatccgggacaagcagtccggcaagacaatcctggatttcctgaagtccgacggcttcgccaacagaaacttcatgcagctgatccacgacgacagcctgacctttaaagaggacatccagaaagcccaggtgtccggccagggcgatagcctgcacgagcacattgccaatctggccggcagccccgccattaagaagggcatcctgcagacagtgaaggtggtggacgagctcgtgaaagtgatgggccggcacaagcccgagaacatcgtgatcgaaatggccagagagaaccagaccacccagaagggacagaagaacagccgcgagagaatgaagcggatcgaagagggcatcaaagagctgggcagccagatcctgaaagaacaccccgtggaaaacacccagctgcagaacgagaagctgtacctgtactacctgcagaatgggcgggatatgtacgtggaccaggaactggacatcaaccggctgtccgactacgatgtggaccatatcgtgcctcagagctttctgaaggacgactccatcgacaacaaggtgctgaccagaagcgacaagaaccggggcaagagcgacaacgtgccctccgaagaggtcgtgaagaagatgaagaactactggcggcagctgctgaacgccaagctgattacccagagaaagttcgacaatctgaccaaggccgagagaggcggcctgagcgaactggataaggccggcttcatcaagagacagctggtggaaacccggcagatcacaaagcacgtggcacagatcctggactcccggatgaacactaagtacgacgagaatgacaagctgatccgggaagtgaaagtgatcaccctgaagtccaagctggtgtccgatttccggaaggatttccagttttacaaagtgcgcgagatcaacaactaccaccacgcccacgacgcctacctgaacgccgtcgtgggaaccgccctgatcaaaaagtaccctaagctggaaagcgagttcgtgtacggcgactacaaggtgtacgacgtgcggaagatgatcgccaagagcgagcaggaaatcggcaaggctaccgccaagtacttcttctacagcaacatcatgaactttttcaagaccgagattaccctggccaacggcgagatccggaagcggcctctgatcgagacaaacggcgaaaccggggagatcgtgtgggataagggccgggattttgccaccgtgcggaaagtgctgagcatgccccaagtgaatatcgtgaaaaagaccgaggtgcagacaggcggcttcagcaaagagtctatcctgcccaagaggaacagcgataagctgatcgccagaaagaaggactgggaccctaagaagtacggcggcttcgacagccccaccgtggcctattctgtgctggtggtggccaaagtggaaaagggcaagtccaagaaactgaagagtgtgaaagagctgctggggatcaccatcatggaaagaagcagcttcgagaagaatcccatcgactttctggaagccaagggctacaaagaagtgaaaaaggacctgatcatcaagctgcctaagtactccctgttcgagctggaaaacggccggaagagaatgctggcctctgccggcgaactgcagaagggaaacgaactggccctgccctccaaatatgtgaacttcctgtacctggccagccactatgagaagctgaagggctcccccgaggataatgagcagaaacagctgtttgtggaacagcacaagcactacctggacgagatcatcgagcagatcagcgagttctccaagagagtgatcctggccgacgctaatctggacaaagtgctgtccgcctacaacaagcaccgggataagcccatcagagagcaggccgagaatatcatccacctgtttaccctgaccaatctgggagcccctgccgccttcaagtactttgacaccaccatcgaccggaagaggtacaccagcaccaaagaggtgctggacgccaccctgatccaccagagcatcaccggcctgtacgagacacggatcgacctgtctcagctgggaggtgacagcggcgggagcggcgggagcggggggagcactaatctgagcgacatcattgagaaggagactgggaaacagctggtcattcaggagtccatcctgatgctgcctgaggaggtggaggaagtgatcggcaacaagccagagtctgacatcctggtgcacaccgcctacgacgagtccacagatgagaatgtgatgctgctgacctctgacgcccccgagtataagccttgggccctggtcatccaggattctaacggcgagaataagatcaagatgctgagcggaggatccggaggatctggaggcagcaccaacctgtctgacatcatcgagaaggagacaggcaagcagctggtcatccaggagagcatcctgatgctgcccgaagaagtcgaagaagtgatcggaaacaagcctgagagcgatatcctggtccataccgcctacgacgagagtaccgacgaaaatgtgatgctgctgacatccgacgccccagagtataagccctgggctctggtcatccaggattccaacggagagaacaaaatcaaaatgctgtctggcggctcaaaaagaaccgccgacggcagcgaattcgagcccaagaagaagaggaaagtc

SEQ ID NO: 617 - DNA, 5559 bp, synthetic construct
  source 1..5559: mol_type = other DNA
atgaaacggacagccgacggaagcgagttcgagtcaccaaagaagaagcggaaagtcagcagtgaaaccggaccagtggcagtggacccaaccctgaggagacggattgagccccatgaatttgaagtgttctttgacccaagggagctgaggaaggagacatgcctgctgtacgagatcaagtggggcacaagccacaagatctggcgccacagctccaagaacaccacaaagcacgtggaagtgaatttcatcgagaagtttacctccgagcggcacttctgcccctctaccagctgttccatcacatggtttctgtcttggagcccttgcggcgagtgttccaaggccatcaccgagttcctgtctcagcaccctaacgtgaccctggtcatctacgtggcccggctgtatcaccacatggaccagcagaacaggcagggcctgcgcgatctggtgaattctggcgtgaccatccagatcatgacagccccagagtacgactattgctggcggaacttcgtgaattatccacctggcaaggaggcacactggccaagatacccacccctgtggatgaagctgtatgcactggagctgcacgcaggaatcctgggcctgcctccatgtctgaatatcctgcggagaaagcagccccagctgacatttttcaccattgctctgcagtcttgtcactatcagcggctgcctcctcatattctgtgggctacaggccttaaatctggaggatctagcggaggatcctctggcagcgagacaccaggaacaagcgagtcagcaacaccagagagcagtggcggcagcagcggcggcagcgacaagaagtacagcatcggcctggacatcggcaccaactctgtgggctgggccgtgatcaccgacgagtacaaggtgcccagcaagaaattcaaggtgctgggcaacaccgaccggcacagcatcaagaagaacctgatcggagccctgctgttcgacagcggcgaaacagccgaggccacccggctgaagagaaccgccagaagaagatacaccagacggaagaaccggatctgctatctgcaagagatcttcagcaacgagatggccaaggtggacgacagcttcttccacagactggaagagtccttcctggtggaagaggataagaagcacgagcggcaccccatcttcggcaacatcgtggacgaggtggcctaccacgagaagtaccccaccatctaccacctgagaaagaaactggtggacagcaccgacaaggccgacctgcggctgatctatctggccctggcccacatgatcaagttccggggccacttcctgatcgagggcgacctgaaccccgacaacagcgacgtggacaagctgttcatccagctggtgcagacctacaaccagctgttcgaggaaaaccccatcaacgccagcggcgtggacgccaaggccatcctgtctgccagactgagcaagagcagacggctggaaaatctgatcgcccagctgcccggcgagaagaagaatggcctgttcggaaacctgattgccctgagcctgggcctgacccccaacttcaagagcaacttcgacctggccgaggatgccaaactgcagctgagcaaggacacctacgacgacgacctggacaacctgctggcccagatcggcgaccagtacgccgacctgtttctggccgccaagaacctgtccgacgccatcctgctgagcgacatcctgagagtgaacaccgagatcaccaaggcccccctgagcgcctctatgatcaagagatacgacgagcaccaccaggacctgaccctgctgaaagctctcgtgcggcagcagctgcctgagaagtacaaagagattttcttcgaccagagcaagaacggctacgccggctacattgacggcggagccagccaggaagagttctacaagttcatcaagcccatcctggaaaagatggacggcaccgaggaactgctcgtgaagctgaacagagaggacctgctgcggaagcagcggaccttcgacaacggcagcatcccccaccagatccacctgggagagctgcacgccattctgcggcggcaggaagatttttacccattcctgaaggacaaccgggaaaagatcgagaagatcctgaccttccgcatcccctactacgtgggccctctggccaggggaaacagcagattcgcctggatgaccagaaagagcgaggaaaccatcaccccctggaacttcgaggaagtggtggacaagggcgcttccgcccagagcttcatcgagcggatgaccaacttcgataagaacctgcccaacgagaaggtgctgcccaagcacagcctgctgtacgagtacttcaccgtgtataacgagctgaccaaagtgaaatacgtgaccgagggaatgagaaagcccgccttcctgagcggcgagcagaaaaaggccatcgtggacctgctgttcaagaccaaccggaaagtgaccgtgaagcagctgaaagaggactacttcaagaaaatcgagtgcttcgactccgtggaaatctccggcgtggaagatcggttcaacgcctccctgggcacataccacgatctgctgaaaattatcaaggacaaggacttcctggacaatgaggaaaacgaggacattctggaagatatcgtgctgaccctgacactgtttgaggacagagagatgatcgaggaacggctgaaaacctatgcccacctgttcgacgacaaagtgatgaagcagctgaagcggcggagatacaccggctggggcaggctgagccggaagctgatcaacggcatccgggacaagcagtccggcaagacaatcctggatttcctgaagtccgacggcttcgccaacagaaacttcatgcagctgatccacgacgacagcctgacctttaaagaggacatccagaaagcccaggtgtccggccagggcgatagcctgcacgagcacattgccaatctggccggcagccccgccattaagaagggcatcctgcagacagtgaaggtggtggacgagctcgtgaaagtgatgggccggcacaagcccgagaacatcgtgatcgaaatggccagagagaaccagaccacccagaagggacagaagaacagccgcgagagaatgaagcggatcgaagagggcatcaaagagctgggcagccagatcctgaaagaacaccccgtggaaaacacccagctgcagaacgagaagctgtacctgtactacctgcagaatgggcgggatatgtacgtggaccaggaactggacatcaaccggctgtccgactacgatgtggaccatatcgtgcctcagagctttctgaaggacgactccatcgacaacaaggtgctgaccagaagcgacaagaaccggggcaagagcgacaacgtgccctccgaagaggtcgtgaagaagatgaagaactactggcggcagctgctgaacgccaagctgattacccagagaaagttcgacaatctgaccaaggccgagagaggcggcctgagcgaactggataaggccggcttcatcaagagacagctggtggaaacccggcagatcacaaagcacgtggcacagatcctggactcccggatgaacactaagtacgacgagaatgacaagctgatccgggaagtgaaagtgatcaccctgaagtccaagctggtgtccgatttccggaaggatttccagttttacaaagtgcgcgagatcaacaactaccaccacgcccacgacgcctacctgaacgccgtcgtgggaaccgccctgatcaaaaagtaccctaagctggaaagcgagttcgtgtacggcgactacaaggtgtacgacgtgcggaagatgatcgccaagagcgagcaggaaatcggcaaggctaccgccaagtacttcttctacagcaacatcatgaactttttcaagaccgagattaccctggccaacggcgagatccggaagcggcctctgatcgagacaaacggcgaaaccggggagatcgtgtgggataagggccgggattttgccaccgtgcggaaagtgctgagcatgccccaagtgaatatcgtgaaaaagaccgaggtgcagacaggcggcttcagcaaagagtctatcctgcccaagaggaacagcgataagctgatcgccagaaagaaggactgggaccctaagaagtacggcggcttcgacagccccaccgtggcctattctgtgctggtggtggccaaagtggaaaagggcaagtccaagaaactgaagagtgtgaaagagctgctggggatcaccatcatggaaagaagcagcttcgagaagaatcccatcgactttctggaagccaagggctacaaagaagtgaaaaaggacctgatcatcaagctgcctaagtactccctgttcgagctggaaaacggccggaagagaatgctggcctctgccggcgaactgcagaagggaaacgaactggccctgccctccaaatatgtgaacttcctgtacctggccagccactatgagaagctgaagggctcccccgaggataatgagcagaaacagctgtttgtggaacagcacaagcactacctggacgagatcatcgagcagatcagcgagttctccaagagagtgatcctggccgacgctaatctggacaaagtgctgtccgcctacaacaagcaccgggataagcccatcagagagcaggccgagaatatcatccacctgtttaccctgaccaatctgggagcccctgccgccttcaagtactttgacaccaccatcgaccggaagaggtacaccagcaccaaagaggtgctggacgccaccctgatccaccagagcatcaccggcctgtacgagacacggatcgacctgtctcagctgggaggtgacagcggcgggagcggcgggagcggggggagcactaatctgagcgacatcattgagaaggagactgggaaacagctggtcattcaggagtccatcctgatgctgcctgaggaggtggaggaagtgatcggcaacaagccagagtctgacatcctggtgcacaccgcctacgacgagtccacagatgagaatgtgatgctgctgacctctgacgcccccgagtataagccttgggccctggtcatccaggattctaacggcgagaataagatcaagatgctgagcggaggatccggaggatctggaggcagcaccaacctgtctgacatcatcgagaaggagacaggcaagcagctggtcatccaggagagcatcctgatgctgcccgaagaagtcgaagaagtgatcggaaacaagcctgagagcgatatcctggtccataccgcctacgacgagagtaccgacgaaaatgtgatgctgctgacatccgacgccccagagtataagccctgggctctggtcatccaggattccaacggagagaacaaaatcaaaatgctgtctggcggctcaaaaagaaccgccgacggcagcgaattcgagcccaagaagaagaggaaagtc

SEQ ID NO: 618 - DNA, 5559 bp, synthetic construct
  source 1..5559: mol_type = other DNA
atgaaacggacagccgacggaagcgagttcgagtcaccaaagaagaagcggaaagtctcatcagaaacaggaccagtcgccgtggacccaacactgaggagaaggattgagccccatgaatttgaagtctttttcgaccccagggagctgaggaaggaggcatgcctgctgtacgagatcaagtggggcacaagccacaagatctggcgcaacagcggcaagaacaccacaaagcacgtggaagtgaatttcatcgagaagtttacctccgagcggcacttctgcccctctatcagctgttccatcacatggtttctgtcttggagcccttgctgggagtgttccaaggccatccgcgagttcctgtctcagcaccctaacgtgaccctggtcatctacgtggcccggctgtttcaacacatggaccagcagaacaggcagggcctgcgcgatctggtgaattctggcgtgaccatccagatcatgacagcctcagagtacgaccattgctggcggaacttcgtgaattatccacctggcaaggaggcacactggccaagatacccacccctgtggatgaagctgtatgcactggagctgcacgcaggaatcctgggcctgcctccatgtctgaatatcctgcggagaaagcagccccagctgacatttttcactatcgcactgcagagctgtcattaccagagactgcctcctcatatcctgtgggctacaggccttaaatctggaggatctagcggaggatcctctggcagcgagacaccaggaacaagcgagtcagcaacaccagagagcagtggcggcagcagcggcggcagcgacaagaagtacagcatcggcctggacatcggcaccaactctgtgggctgggccgtgatcaccgacgagtacaaggtgcccagcaagaaattcaaggtgctgggcaacaccgaccggcacagcatcaagaagaacctgatcggagccctgctgttcgacagcggcgaaacagccgaggccacccggctgaagagaaccgccagaagaagatacaccagacggaagaaccggatctgctatctgcaagagatcttcagcaacgagatggccaaggtggacgacagcttcttccacagactggaagagtccttcctggtggaagaggataagaagcacgagcggcaccccatcttcggcaacatcgtggacgaggtggcctaccacgagaagtaccccaccatctaccacctgagaaagaaactggtggacagcaccgacaaggccgacctgcggctgatctatctggccctggcccacatgatcaagttccggggccacttcctgatcgagggcgacctgaaccccgacaacagcgacgtggacaagctgttcatccagctggtgcagacctacaaccagctgttcgaggaaaaccccatcaacgccagcggcgtggacgccaaggccatcctgtctgccagactgagcaagagcagacggctggaaaatctgatcgcccagctgcccggcgagaagaagaatggcctgttcggaaacctgattgccctgagcctgggcctgacccccaacttcaagagcaacttcgacctggccgaggatgccaaactgcagctgagcaaggacacctacgacgacgacctggacaacctgctggcccagatcggcgaccagtacgccgacctgtttctggccgccaagaacctgtccgacgccatcctgctgagcgacatcctgagagtgaacaccgagatcaccaaggcccccctgagcgcctctatgatcaagagatacgacgagcaccaccaggacctgaccctgctgaaagctctcgtgcggcagcagctgcctgagaagtacaaagagattttcttcgaccagagcaagaacggctacgccggctacattgacggcggagccagccaggaagagttctacaagttcatcaagcccatcctggaaaagatggacggcaccgaggaactgctcgtgaagctgaacagagaggacctgctgcggaagcagcggaccttcgacaacggcagcatcccccaccagatccacctgggagagctgcacgccattctgcggcggcaggaagatttttacccattcctgaaggacaaccgggaaaagatcgagaagatcctgaccttccgcatcccctactacgtgggccctctggccaggggaaacagcagattcgcctggatgaccagaaagagcgaggaaaccatcaccccctggaacttcgaggaagtggtggacaagggcgcttccgcccagagcttcatcgagcggatgaccaacttcgataagaacctgcccaacgagaaggtgctgcccaagcacagcctgctgtacgagtacttcaccgtgtataacgagctgaccaaagtgaaatacgtgaccgagggaatgagaaagcccgccttcctgagcggcgagcagaaaaaggccatcgtggacctgctgttcaagaccaaccggaaagtgaccgtgaagcagctgaaagaggactacttcaagaaaatcgagtgcttcgactccgtggaaatctccggcgtggaagatcggttcaacgcctccctgggcacataccacgatctgctgaaaattatcaaggacaaggacttcctggacaatgaggaaaacgaggacattctggaagatatcgtgctgaccctgacactgtttgaggacagagagatgatcgaggaacggctgaaaacctatgcccacctgttcgacgacaaagtgatgaagcagctgaagcggcggagatacaccggctggggcaggctgagccggaagctgatcaacggcatccgggacaagcagtccggcaagacaatcctggatttcctgaagtccgacggcttcgccaacagaaacttcatgcagctgatccacgacgacagcctgacctttaaagaggacatccagaaagcccaggtgtccggccagggcgatagcctgcacgagcacattgccaatctggccggcagccccgccattaagaagggcatcctgcagacagtgaaggtggtggacgagctcgtgaaagtgatgggccggcacaagcccgagaacatcgtgatcgaaatggccagagagaaccagaccacccagaagggacagaagaacagccgcgagagaatgaagcggatcgaagagggcatcaaagagctgggcagccagatcctgaaagaacaccccgtggaaaacacccagctgcagaacgagaagctgtacctgtactacctgcagaatgggcgggatatgtacgtggaccaggaactggacatcaaccggctgtccgactacgatgtggaccatatcgtgcctcagagctttctgaaggacgactccatcgacaacaaggtgctgaccagaagcgacaagaaccggggcaagagcgacaacgtgccctccgaagaggtcgtgaagaagatgaagaactactggcggcagctgctgaacgccaagctgattacccagagaaagttcgacaatctgaccaaggccgagagaggcggcctgagcgaactggataaggccggcttcatcaagagacagctggtggaaacccggcagatcacaaagcacgtggcacagatcctggactcccggatgaacactaagtacgacgagaatgacaagctgatccgggaagtgaaagtgatcaccctgaagtccaagctggtgtccgatttccggaaggatttccagttttacaaagtgcgcgagatcaacaactaccaccacgcccacgacgcctacctgaacgccgtcgtgggaaccgccctgatcaaaaagtaccctaagctggaaagcgagttcgtgtacggcgactacaaggtgtacgacgtgcggaagatgatcgccaagagcgagcaggaaatcggcaaggctaccgccaagtacttcttctacagcaacatcatgaactttttcaagaccgagattaccctggccaacggcgagatccggaagcggcctctgatcgagacaaacggcgaaaccggggagatcgtgtgggataagggccgggattttgccaccgtgcggaaagtgctgagcatgccccaagtgaatatcgtgaaaaagaccgaggtgcagacaggcggcttcagcaaagagtctatcctgcccaagaggaacagcgataagctgatcgccagaaagaaggactgggaccctaagaagtacggcggcttcgacagccccaccgtggcctattctgtgctggtggtggccaaagtggaaaagggcaagtccaagaaactgaagagtgtgaaagagctgctggggatcaccatcatggaaagaagcagcttcgagaagaatcccatcgactttctggaagccaagggctacaaagaagtgaaaaaggacctgatcatcaagctgcctaagtactccctgttcgagctggaaaacggccggaagagaatgctggcctctgccggcgaactgcagaagggaaacgaactggccctgccctccaaatatgtgaacttcctgtacctggccagccactatgagaagctgaagggctcccccgaggataatgagcagaaacagctgtttgtggaacagcacaagcactacctggacgagatcatcgagcagatcagcgagttctccaagagagtgatcctggccgacgctaatctggacaaagtgctgtccgcctacaacaagcaccgggataagcccatcagagagcaggccgagaatatcatccacctgtttaccctgaccaatctgggagcccctgccgccttcaagtactttgacaccaccatcgaccggaagaggtacaccagcaccaaagaggtgctggacgccaccctgatccaccagagcatcaccggcctgtacgagacacggatcgacctgtctcagctgggaggtgacagcggcgggagcggcgggagcggggggagcactaatctgagcgacatcattgagaaggagactgggaaacagctggtcattcaggagtccatcctgatgctgcctgaggaggtggaggaagtgatcggcaacaagccagagtctgacatcctggtgcacaccgcctacgacgagtccacagatgagaatgtgatgctgctgacctctgacgcccccgagtataagccttgggccctggtcatccaggattctaacggcgagaataagatcaagatgctgagcggaggatccggaggatctggaggcagcaccaacctgtctgacatcatcgagaaggagacaggcaagcagctggtcatccaggagagcatcctgatgctgcccgaagaagtcgaagaagtgatcggaaacaagcctgagagcgatatcctggtccataccgcctacgacgagagtaccgacgaaaatgtgatgctgctgacatccgacgccccagagtataagccctgggctctggtcatccaggattccaacggagagaacaaaatcaaaatgctgtctggcggctcaaaaagaaccgccgacggcagcgaattcgagcccaagaagaagaggaaagtc

SEQ ID NO: 619 - protein, 228 aa, synthetic construct
SSETGPVAVDPTLRRRIEPHEFEVFFDPRELRKETCLLYEINWGGRHSIWRHTSQNTNKHVEVNFIEKFTTERYFCPNTRCSITWFLSWSPCGECSRAITEFLSRYPHVTLFIYIARLYHHADPRNRQGLRDLISSGVTIQIMTEQESGYCWRNFVNYSPSNEAHWPRYPHLWVRLYVLELYCIILGLPPCLNILRRKQPQLTFFTIALQSCHYQRLPPHILWATGLK

SEQ ID NO: 620 - protein, 228 aa, synthetic construct
SSETGPVAVDPTLRRRIEPEFFNRNYDPRELRKETYLLYEIKWGKESKIWRHTSNNRTQHAEVNFLENFFNELYFNPSTHCSITWFLSWSPCGECSKAIVEFLKEHPNVNLEIYVARLYLCEDERNRQGLRDLVNSGVTIRIMNLPDYNYCWRTFVSHQGGDEDYWPRHFAPWVRLYVLELYCIILGLPPCLNILRRKQPQLTFFTIALQSCHYQRLPPHILWATGLK

SEQ ID NO: 621 - protein, 384 aa, synthetic construct
MKPHFRNTVERMYRDTFSYNFYNRPILSRRNTVWLCYEVKTKGPSRPPLDAKIFRGQVYSELKYHPEMRFFHWFSKWRKLHRDQEYEVTWYISWSPCTKCTRDMATFLAEDPKVTLTIFVARLYYFWDPDYQEALRSLCQKRDGPRATMKIMNYDEFQHCWSKFVYSQRELFEPWNNLPKYYILLHIMLGEILRHSMDPPTFTFNFNNEPWVRGRHETYLCYEVERMHNDTWVLLNQRRGFLCNQAPHKHGFLEGRHAELCFLDVIPFWKLDLDQDYRVTCFTSWSPCFSCAQEMAKFISKNKHVSLCIFTARIYRRQGRCQEGLRTLAEAGAKISIMTYSEFKHCWDTFVDHQGCPFQPWDGLDEHSQDLSGRLRAILQNQEN

SEQ ID NO: 622 - protein, 184 aa, synthetic construct
MDPPTFTFNFNNEPWVRGRHETYLCYEVERMHNDTWVLLNQRRGFLCNQAPHKHGFLEGRHAELCFLDVIPFWKLDLDQDYRVTCFTSWSPCFSCAQEMAKFISKNKHVSLCIFTARIYDDQGRCQEGLRTLAEAGAKISIMTYSEFKHCWDTFVDHQGCPFQPWDGLDEHSQDLSGRLRAILQ

SEQ ID NO: 623 - protein, 184 aa, synthetic construct
MDPPTFTFNFNNEPWVRGRHETYLCYEVERMHNDTWVLLNQRRGFLCNQAPHKHGFLEGRHAELCFLDVIPFWKLDLDQDYRVTCFTSWSPCFSCAQEMAKFISKNKHVSLCIFTARIYRRQGRCQEGLRTLAEAGAKISIMTYSEFKHCWDTFVDHQGCPFQPWDGLDEHSQDLSGRLRAILQ

SEQ ID NO: 624 - protein, 428 aa, Mus sp.
MGPFCLGCSHRKCYSPIRNLISQETFKFHFKNLGYAKGRKDTFLCYEVYRKOCOSPVSLHHGVFKNKONIHAEICFLYWFHDKVLKVLSPREEFKITWYMSWSPCFECAEQIVRFLATHHNLSLDIFSSRLYNVQDPETQQNLCRLVQEGAQVAAMDLYEFKKCWKKFVDNGGRRFRPWKRLLTNFRYQDSKLQEILRPCYIPVPSSSSSTLSNICLTKGLPETRFCVEGRRMDPLSEEEFYSQFYNQRVKHLCYYHRMKPYLCYQLEQFNGQAPLKGCLLSEKGKQHAEILFLDKIRSMELSQVTITCYLTWSPCPNCAWQLAAFKRORPOULHIATSRLYFHWKRPFQKGLCSLWQSGILVDVMDLPQFTDCWTNFVNPKRPFWPWKGLEIISRRTQRRLRRIKESWGLQDLVNDFGNLQLGPPMS

SEQ ID NO: 625 - protein, 429 aa, Rattus sp.
MGPFCLGCSHRKCYSPIRNLISQETFKFHFKNLRYAIDRKDTFLCYEVTRKDCDSPVSLHHGVFKNKDNIHAEICFLYWFHDKVLKVLSPREEFKITWYMSWSPCFECAEQVLRFLATHHNLSLDIFSSRLYNIRDPENQQNLCRLVQEGAQVAAMDLYEFKKCWKKFVDNGGRRFRPWKKLLTNFRYQDSKLQEILRPCYIPVPSSSSSTLSNICLTKGLPETRFCVERRRVHLLSEEEFYSQFYNQRVKHLCYYHGVKPYLCYQLEQFNGQAPLKGCLLSEKGKQHAEILFLDKIRSMELSQVIITCYLTWSPCPNCAWQLAAFKRDRPDLILHIYTSRLYFHWKRPFQKGLCSLWQSGILVDVMDLPQFTDCWTNFVNPKRPFWPWKGLEIISRRTQRRLHRIKESWGLQDLVNDFGNLQLGPPMS

SEQ ID NO: 626 - protein, 370 aa, Macaca mulatta; identical to SEQ ID NO: 33

SEQ ID NO: 627 - protein, 384 aa, Pan troglodytes; identical to SEQ ID NO: 34

SEQ ID NO: 628 - protein, 377 aa, Chlorocebus sabaeus; identical to SEQ ID NO: 35

SEQ ID NO: 629 - protein, 384 aa, Homo sapiens; identical to SEQ ID NO: 36

SEQ ID NO: 630 - protein, 373 aa, Homo sapiens; identical to SEQ ID NO: 32

SEQ ID NO: 631 - protein, 382 aa, Homo sapiens; identical to SEQ ID NO: 37

SEQ ID NO: 632 - protein, 396 aa, Rattus sp.
MQPQGLGPNAGMGPVCLGCSHRRPYSPIRNPLKKLYQQTFYFHFKNVRYAWGRKNNFLCYEVNGMDCALPVPLRQGVFRKQGHIHAELCFIYWFHDKVLRVLSPMEEFKVTWYMSWSPCSKCAEQVARFLAAHRNLSLAIFSSRLYYYLRNPNYQQKLCRLIQEGVHVAAMDLPEFKKCWNKFVDNDGQPFRPWMRLRINFSFYDCKLQEIFSRMNLLREDVFYLQFNNSHRVKPVQNRYYRRKSYLCYQLERANGQEPLKGYLLYKKGEQHVEILFLEKMRSMELSQVRITCYLTWSPCPNCARQLAAFKKDHPDLILRIYTSRLYFYWRKKFQKGLCTLWRSGIHVDVMDLPQFADCWTNFVNPQRPFRPWNELEKNSWRIQRRLRRIKESWGL

SEQ ID NO: 633 - protein, 227 aa, Bos sp.
DGWEVAFRSGTVLKAGVLGVSMTEGWAGSGHPGQGACVWTPGTRNTMNLLREVLFKQQFGNQPRVPAPYYRRKTYLCYQLKQRNDLTLDRGCFRNKKQRHAEIRFIDKINSLDLNPSQSYKIICYITWSPCPNCANELVNFITRNNHLKLEIFASRLYFHWIKSFKMGLQDLQNAGISVAVMTHTEFEDCWEQFVDNQSRPFQPWDKLEQYSASIRRRLQRILTAPI

SEQ ID NO: 634 - protein, 490 aa, Pan troglodytes; identical to SEQ ID NO: 40

SEQ ID NO: 635 - protein, 190 aa, Gorilla sp.
MNPQIRNPMKAMYPGTFYFQFKNLWEANDRNETWLCFTVEGIKRRSVVSWKTGVFRNQVDSETHCHAERCFLSWFCDDILSPNTNYQVTWYTSWSPCPECAGEVAEFLARHSNVNLTIFTARLYYFQDTDYQEGLRSLSQEGVAVKIMDYKDFKYCWENFVYNDDEPFKPWKGLKYNFRFLKRRLQEILE

SEQ ID NO: 636 - protein, 199 aa, Homo sapiens
MEASPASGPRHLMDPHIFTSNFNNGIGRHKTYLCYEVERLDNGTSVKMOQHRGEEHNQAKNEECGEAGRHAELRFLDLVPSLQLDPAQIYRVTWFISWSPCFSWGCAGEVRAFLQENTHVRLRIFAARIYDYDPLYKEALQMLRDAGAQVSIMTYDEFKHCWDTFVDHQGCPFQPWDGLDEHSQALSGRLRAILQNQGN

SEQ ID NO: 637 - protein, 202 aa, Macaca mulatta
MDGSPASRPRHLMDPNTFTFNFNNDLSVRGRHQTYLCYEVERLDNGTWVPMDERRGEECNKAKNNPCGOAGCHVELRFLCEVPSWQLDPAQTYRVTWFISWSPCERRGCAGQVRVFLQENKHVRLRIFAARIYDYDPLYQEALRTLRDAGAQVSIMTYEEFKHCWDTFVDRQGRPFQPWDGLDEHSQALSGRLRAILQNQGN

SEQ ID NO: 638 - protein, 184 aa, Bos sp.
MDEYTFTENFNNQGWPSKTYLCYEMERLDGDATIPLDEYKGFVRNKGLDQPEKPCAELYFLGKIHSWNLDRNQHYRLTCFISWSPCAOCAQKEEEEEKENHHISUIIEASRIAEHNRFGCHQSGLCELQAAGARITIMTFEDFKHCWETFVDHKGKPFQPWEGLNVKSQALCTELQAILKTQQN

SEQ ID NO: 639 - protein, 201 aa, Homo sapiens
MALLTAETFRLQFNNKRRLRRPYYPRKALLCYQLTPQNGSTPTRGYFENKKKCHAEICFINEIKSMGLDETQCYQVTCYLTYVSPCSSCAWEENOEIKAHOHENEGIEASRLYYHWCKPQQKGLRLLCGSQVPVEVMGFPKFADCWENFVDHEKPLSFNPYKMLEELDKNSRAIKRRLERIKIPGVRAQGRYMDILCDAEV

SEQ ID NO: 640 - protein, 380 aa, Homo sapiens
MNPQIRNPMERMYRDTFYDNFENEPILYGRSYTWLCYEVKIKRGRSNEEWDEGNERGPNEPKRQSNHRQENYERFENHAEMCFLSWFCGNRLPANRRFQITWFVSWPCLPCVVKVTKFLAEHPNVTLTISAARLYYYRDRDWRWVLLRLHKAGARVKIMDYEDFAYCWENFVCNEGQPFMPWYKFDDNYASLHRTLKEILRNPMEAMYPHIFYFHFKNLLKACGRNESWLCFTMEVTKHHSAVFRKRGVFRNQVDPETHCAEPCFLSWFCDDLSPIYPVFEMMWSPCPECAGEVAEFLARHSNVNLTIFTARLCYFWDTDYQEGLCSLSQEGASVKIMGYKDFVSCWKNFVYSDDEPFKPWKGLQTNFRLLKRRLREILQ

SEQ ID NO: 641 - protein, 228 aa, Rattus sp.
SSETGPVAVDPTLRRRIEPHEFEVFFDPRELRKETCLLYEINWGGRHSIWRHTSQNTNKHVEVNFIEKFTTERYFCPNTRCSRRWFLSWSPCGECSRAITEFLSRYPHVTLFIYIARLYHHADPRNRQGLRDLISSGVTIQIMTEQESGYCWRNFVNYSPSNEAHWPRYPHLWVRLYVLELYCIILGLPPCLNILRRKQPQLTFFTIALQSCHYQRLPPHILWATGLK

SEQ ID NO: 642 - protein, 228 aa, synthetic construct
SSETGPVAVDPTLRRRIEPHEFEVFFDPRELRKETCLLYEIKWGTSHKIWRHSSKNTTKHVEVNFIEKFTSERHFCPSTSCSITWFLSWSPCGECSKAITEFLSQHPNVTLVIYVARLYHHMDQQNRQGLRDLVNSGVTIQIMTAPEYDYCWRNFVNYPPGKEAHWPRYPPLWMKLYALELHAGILGLPPCLNILRRKQPQLTFFTIALQSCHYQRLPPHILWATGLK

SEQ ID NO: 643 - protein, 228 aa, synthetic construct
SSETGPVAVDPTLRRRIEPHEFEVFFDPRELRKEACLLYEIKWGTSHKIWRNSGKNTTKHVEVNFIEKFTSERHFCPSISCSITWFLSWSPCWECSKAIREFLSQHPNVTLVIYVARLFQHMDQQNRQGLRDLVNSGVTIQIMTASEYDHCWRNFVNYPPGKEAHWPRYPPLWMKLYALELHAGILGLPPCLNILRRKQPQLTFFTIALQSCHYQRLPPHILWATGLK

SEQ ID NO: 644 - protein, 228 aa, synthetic construct
SSETGPVAVDPTLRRRIEPEFFNRNYDPRELRKETYLLYEIKWGKESKIWRHTSNNRTQHAEVNFLENFFNELYFNPSTHCSRRWFLSWSPCGECSKAIVEFLKEHPNVNLEIYVARLYLCEDERNRQGLRDLVNSGVTIRIMNLPDYNYCWRTFVSHQGGDEDYWPRHFAPWVRLYVLELYCIILGLPPCLNILRRKQPQLTFFTIALQSCHYQRLPPHILWATGLK

SEQ ID NO: 645 - protein, 228 aa, synthetic construct
SSETGPVAVDPTLRRRIEPFYFQFNNDPRACRRKTYLCYELKQDGSTWVWKRTLHNKGRHAEICFLEKISSLEKLDPAQHYRITWYMSWSPCSNCAQKIVDFLKEHPHVNLRIYVARLYYHEEERYQEGLRNLRRSGVSIRVMDLPDFEHCWETFVDNGGGPFQPWPGLEELNSKQLSRRLQAGILGLPPCLNILRRKQPQLTFFTIALQSCHYQRLPPHILWATGLK

SEQ ID NO: 646 - protein, 228 aa, synthetic construct
SSETGPVAVDPTLRRRIEPFHFQFNNDPRAYRRKTYLCYELKQDGSTWVLDRTLRNKGRHAEICFLDKINSWERLDPAQHYRVTWYMSWSPCSNCAQQVVDFLKEHPHVNLRIFAARLYYHEQRRYQEGLRSLRGSGVPVAVMTLPDFEHCWETFVDHGGRPFQPWDGLEELNSRSLSRRLQAGILGLPPCLNILRRKQPQLTFFTIALQSCHYQRLPPHILWATGLK

SEQ ID NO: 647 - protein, 452 aa, Homo sapiens
MSTAVLENPGLGRKLSDFGQETSYIEDNCNQNGAISLIFSLKEEVGALAKVLRLFEENDVNLTHIESRPSRLKKDEYEFFTHLDKRSLPALTNIIKILRHDIGATVHELSRDKKKDTVPWFPRTIQELDRFANQILSYGAELDADHPGFKDPVYRARRKQFADIAYNYRHGQPIPRVEYMEEEKKTWGTVFKTLKSLYKTHACYEYNHIFPLLEKYCGFHEDNIPQLEDVSQFLQTCTGFRLRPVAGLLSSRDFLGGLAFRVFHCTQYIRHGSKPMYTPEPDICHELLGHVPLFSDRSFAQFSQEIGLASLGAPDEYIEKLATIYWFTVEFGLCKQGDSIKAYGAGLLSSFGELQYCLSEKPKLLPLELEKTAIQNYTVTEFQPLYYVAESFNDAKEKVRNFAATIPRPFSVRYDPYTQRIEVLDNTQQLKILADSINSEIGILCSALQKIK

SEQ ID NO: 648 - DNA, 1359 bp, Homo sapiens
  source 1..1359: mol_type = other DNA
atgtccactgcggtcctggaaaacccaggcttgggcaggaaactctctgactttggacaggaaacaagctatattgaagacaactgcaatcaaaatggtgccatatcactgatcttctcactcaaagaagaagttggtgcattggccaaagtattgcgcttatttgaggagaatgatgtaaacctgacccacattgaatctagaccttctcgtttaaagaaagatgagtatgaatttttcacccatttggataaacgtagcctgcctgctctgacaaacatcatcaagatcttgaggcatgacattggtgccactgtccatgagctttcacgagataagaagaaagacacagtgccctggttcccaagaaccattcaagagctggacagatttgccaatcagattctcagctatggagcggaactggatgctgaccaccctggttttaaagatcctgtgtaccgtgcaagacggaagcagtttgctgacattgcctacaactaccgccatgggcagcccatccctcgagtggaatacatggaggaagaaaagaaaacatggggcacagtgttcaagactctgaagtccttgtataaaacccatgcttgctatgagtacaatcacatttttccacttcttgaaaagtactgtggcttccatgaagataacattccccagctggaagacgtttctcaattcctgcagacttgcactggtttccgcctccgacctgtggctggcctgctttcctctcgggatttcttgggtggcctggccttccgagtcttccactgcacacagtacatcagacatggatccaagcccatgtatacccccgaacctgacatctgccatgagctgttgggacatgtgcccttgttttcagatcgcagctttgcccagttttcccaggaaattggccttgcctctctgggtgcacctgatgaatacattgaaaagctcgccacaatttactggtttactgtggagtttgggctctgcaaacaaggagactccataaaggcatatggtgctgggctcctgtcatcctttggtgaattacagtactgcttatcagagaagccaaagcttctccccctggagctggagaagacagccatccaaaattacactgtcacggagttccagcccctgtattacgtggcagagagttttaatgatgccaaggagaaagtaaggaactttgctgccacaatacctcggcccttctcagttcgctacgacccatacacccaaaggattgaggtcttggacaatacccagcagcttaagattttggctgattccattaacagtgaaattggaatcctttgcagtgccctccagaaaataaagtaa

SEQ ID NO: 649 - DNA, 32767 bp, Homo sapiens
  source 1..32767: mol_type = genomic DNA
caacctacctgcttccaaagtccattcgcaccagggcctgaccaggccgagcccctcagaaccagttggtgaagtcgagaagctcctgctcctcggggctgagcgggtcgtaagagccctcgtccgacgagtaggatgagaccggcgagccggccatggagttcaagtcgttggagtagttgggggagatggtgggcgacaggacgcctgcctggaaggcggcgctcaccgcgtcatgctcgtccagcagctgctgcagcgcgcggatgtactcgaccgccgagcgcagtgtctccaccttactcatcttcttgttggccgcgccgttggggacgtgctcccgaagggtggcaaagcccaggttgaccaacttgacgcggttgcgctcgcgctcgttgcggcgcgccacggcggccggctgctgctgcggcaggctgtagccaaagccgctgaagttgagccggcgtttgcagcgcatcagttcgggcgaagacgagcgctgtcgcttgacttgcttgggcgctgacttgtgaccgccccctgagggctggccgtcggccgccggtctcagctgcggcgcctgctgctgctgctgctgctgctgctgctgctgctgcgcgctctgcgctgccgctgcggcggctgcggccgccgcggctgcggccgtggcaaagaaacaggctgcgggcggcaggaagggctgctggggctgcggctggggctgctggccggcgccgccgctctccatcttggcagagctttccatgcgcagcggcggccaaggagtcgcggaatcagagcgatccgggacgcgaggtgcggggcccgcgagggggacacagagagaacttgggtgcaggaacagagagggaaagaaaaggaaatatgaagcgggagccctgacggaagttaaaaaatatatacaaaatccccgggagacttcttagagtgggagcaaaaaaagtgaaaatgctttttctcctccctgcacgccgcctcctcctccctcccctcctcccttcgcgggttggcttcgggagcctcgcgtggcgctcgcgtgtgaggctgccgctggcgccttcttgtttctaagaaaaaaaaaagcagaagcagcagcaaaagtcagtgctgaacgcgctctgccgcgtctcgcgttcctctcctactaaggctgcgctctcttgcgccgggtctcggtctctccagccgtggctcaggctgtttttattattttgttaactcccttcctttctgatttccttctttcactcgccctccctggccggatccctgtcggtgcgccttccacgttccctggccagaagtgagagagtgctgggctgccggagtgcgtccgccttttcaatgggacacccagccccacgcgcagccctggccccgcctcgccccccactccccgctgctgcagcgagcggctgcagcccccactcccccccctcctcttacctcttcctcccacccactccctaaactccccctcctcctctcctctccccccctcccgttcctttctcccgctccttgcaaactctccattcagctgggtttgttgttgcagtgcgtgcgcctggcgcgtgccggactcccggctgaataaacaggcggcgcgctcggggcgggctgctgccgggggtggctttaggaagggggtggggggcgtcacaggagggacaaatggctctaggaattgaggtgtataggtggaaagacttggggtgaagctctcttggattctactaagaacttgaagcaaagcgcagggaagggtttgggcagaaaaaatggcacaggaacggtgtggaggtgaggagggagtggggctcgacttttcctgttttctctctctcctcactgttattctcttcgggttcctcggtgaccctagaaattggagcaaattacgattgaagtttagaaacatggttgggggagggactccgtccagaacagtgaaaaaaagtgctggactatgtgaaaacgtgggttctagtcccaaggcgtcctctcaatgctctgtggctcctcgaagtggcatcctctctgagccttcgcttcctcgtctgcagccacagaatatggtctctaatgtcccattcagctctaaaaactaggatgtgctccccataactgagcaagtgtgtggggggccgcggggaagcgacaccgaggagtggttgtgagccgtcctgtaggtgggtgtatatggcagggacgtccccctaggatgacctctggccccctgtaccatcgccccctaccgccaccccctccccataaagattatttccggaccagcttagcggatatcataaagaagggagtgctctgggatactcccagaccctcggagaagaaagatgcggggcgggggttgagtgatggcgcttagggcactggtggggattcctggttcttcggcgccgccgcgggcacctcggcggccttggcgcagccaccatcccgccccaggcgtgtgcccggcggcccggtggcaggcgactgggagcggagcccggcggggccgcgtgctggcgccgagagggagggggaggcgcttgcagccgtcgctcgaccgcttggacagcgcctgcccaggcgtccttcctgggccttcggccctggcgctctctggccagaaccccgtccagcttcaggacgtctggggacgcggcgctgcggagaaagcagaccaagcaataggccccatctctttaaggatctggtccggagagaggctggggcatgtctcaggtcttgtctacataggcagaacgaagtggagggcaatcatccatttgattttccagtagaaataatccgagatctgggtgcaggaatgattgtggtgaattatccggataattggttctaattgaactcccctttgtggaggtggatctttctaaagggccaaggggatgacccagggagctgctcttggtatgtgggctggctgagtgtttctggaacaatagtgatgatggtgggcagtaatgacgggcggctcccgaagtgaatcacctctcttctctacctcagtttcatctttgcagaataggtaggcttcagaggtataggaccaaatcgtgccaacagaggtcaattctgtaacctttcccagccacacagccccttctccccatggtaacctgtggcttgatggcctcacaggactggctgaaccccgtgggattcacacctcaggcctttctccacatccctgaccaaggaaagggcctaagaggtctctggaagtataggaggtgagcacccaaaagcagagtcacaacacagcctgggcaccctgcacctcccagccagagtaagcctcagaccacttgcagaaataggaattattcaggcactccttacccacctcccacatgacccagctgtgtcctaatgccccattcactctatttcagccaaatagttgagtgttgggggtgggagggagtgtcgcaaatgtggaagcatctagatgtgttttcttttacattaagctgaaacatgagccccaaactccctactaacttggactcacttcacaaaggtcccgagtctgagctctaccacaatggtgccttataaccttgaacaagtccctctgcctctactggcctcagttttctgatctacacacaagggatgtacagtagctaattttgaaacttgtatctaacagcttagaaaatttgctggtagccagcacgtgtttccttttccaggatgcatacacagagatctcaataccagggaagtagaggacagaacctcctctcctcctcccccctacacacaccatgaaatgggtgcccaaatggagtggaagtgcattgtagtgaagaagccttgtcttgtagtggccttactcattggcctcaggccaggaggaaggacagtcgttgctgggatccttctggccaaaaccgccagaacatttgtctctattctccctatgccagccctgagcctgacctcactcttctcaccctagtatgctaagttttcttccttacatgctttgcaaagccttccaagaaccgaggcgttctcctccccccactcaagtaaacctggagtttgcacctcaacactgtcatctccactttctcctccaaccctagggtagaacagtctataatttttctttagaggtttgcatttctatccttggggattctaccaagagagttttccattgatattggctttctggttgttttcaccagtgtgaagcaaaagatgggaggctcaggagccaaaattagaatcctgcctctgactgtgtgacctagattataatccctcctcccgacctgagagaactggccacatgttctgctctcctaggcccatggaattccagataaagcaggctgatttgacttggtatctaggcccctttacctgagagctgtgtgaccctgagacactctaggggtctctatttcacctatgccagtaattatagtatctacctccaagagttgtgagacttcaatgatatgtatgtagagcactctagcccaggtctaaagagaaagggattaataagaaagtcatgctcacacaacccacccaggaaagggtgtgtggcaggaggagcctcagcacttggcttcctggaaccactctgtgatcatcactccagccaatggagatccagtgccactctgtctcactgtcccagcacctaggggtgagtcattcctgtcatttttgagaaatggtggtgatactggcatattaagatgatggagatagtaacccgatttttagacatgaaaagtagcaagtaagatagactatagagatgttctgtggcctccacatgcaaggggcttcagcagagccactgggccctgctttcttggctcccttgccacacagtgggcctgattctgagcaagtccttagggctttagttggctaagacacttgaacaatgtcccatttatcttcacatgaagggagaagtaaacaactcacaaaaggaaggtttgataccttcattcataaatgaggtggtagtactccctttgcctgtatgtcaagggtgttatgagaattaaatcagatgttgttgggtaatttgctttgcaagtctctccacatatcagagattgccttttcactttttccgaatagcagcattcagtgttctgtcttgtcatgagggtgggggagtgggaaggacaaagcactgatcccctttggtgagtatcacccagagtacagacattgcagaaagataagaaggcttctctttctcctccaatacaataagggacttaatttctgcaccttcagacccctttcctatatcagaacactctggagctgaaccatacttcagattagactttatcttcattcagcatcaggatctgtagggggagatggctttcctagtggccaaaggggtctgctgccctgagatcagagaccctgtgccctgagtctcctgccaccttaatttccattcacagctgaaggccaggccagtaccacctttgctgaagctcaagacctatgtatgttctcttgattgtgtgttgtctctctgtaaaaagaagatatgactcatctctttgaaaaccaatttatgctttctctttggggagagggattgatattaaaagtgaaactaggattttcattggacaaataatttaataaagttatatttttaactttagttagattctgaatcaggggcaaagggaatacaaagatgaacacaagtcttggattctggattttgttacaggattttaagtgtaatcctcaatttgggggtgacttgagttccagaagcaatggatgctttgagaaaagtgagtgtgcttggcattcatagccaatattcatcttccaggagctataattaatacagggcctctgtcctgctggggtgtctgctgttctaaggctgtgctagacactgtcctacccagggaaaatgaaaaggactttactgcacaatctactgcctctaagaataccctacccaaggtaatttcagaaaggattgctgcccagcctgcattgactctgcaccagccttggagggcctgctcagggggcagaatagcacaaaccatgtatttggcttggctcagcttcctggtcacagcagccaggcttgcacctgcattaaggaattcagccttctaacaaatctattcactttttcaatatgctttaaaaagaaaaaagtttgaaaaaacaaaacaaaaaaagcacaaactatattttattgtggcttttgggataaggagggaatgtggggtggggtgaggaggtaatttgcagccaccctcacaagtccttttgaagttctccaaataaggagaagtaacgctaagtctttatttttttctaaagccccatttacattatgattaaataccttccttggatgagcataaagaaagtcgttaatctatatagctctccaaagaatcaatacattctaaacttttgtaggatttgttacactctattttgttacagtaggccagctcctctctgtctaggcacatggctttccttccctcctcctccccacctcctccaagaatgaaaataaagtaaaggtctttcatggtaaacaaaaccagctgattcttcacagagaacccctgaatagctggagaagaaaaaaaaaacttacaataaatggtgcatttttttctctgctgggtgtagtattcaaggatcagggcagtattcaaacagaggtccattttttgctcagcaagagagtttagaaaagaagcgtggagtccattcagagctctccccccttcacaatcgaagggctctatgaaacctatcttccatgccttgtcagagtgtttctggggaccaattagtgctttgttgtacggcttctttgctgaatctttgagccgcaagaaaaagcgctcttgagtctccccttattttgaccatttcagtcattactcagtgtaataattaatatgacaactggacgctggagtttgtatagaaacacctcagctacaggagcaagtgtgcagtgggtggtaacgagccgcacatcagccggagaagccacacacacaaaaaaagcaatgaatggcaagagagaaagagaaggaataaagataaaatagttggcacaacgcaggggaacataaaacagactcaaatgagaagaaggagggggaaggggggacaatttaaaggggagggggaaaaatgccctacagaggttaacttattttgaaactgttttctgaatagaaccgtggacgtgagtgaccggatttcagcccatcaaatctcccacccccactttgtggatcctcttggaactcgggggtggggaagagggctccagcaaactttaggttctccccagggttcttctggaaggtgtacccaacatgctactcagcccaattcccaaccctttgcaccaggtttggcttctgtttttatttttgcaaagtctgttcctcttggctccaacttccgtctttggagttgttaatggagaagttagggtgctatgtagattcaccaggcgagttcagtactactaccctggggatgaatgttggtgagaagccattccagatagacccccaacaactctgcttcgttgaccctcagaacagtaccctgtgggactcctgagccgtaaggagtctccctggtagcgcgcagcggggccaggctctgtgctccggcccccgtgcggtgcccagctctgcaggttcccgaaagtgcgccccggggtggggttgcaatccgccccgtgacggcataataaataattagagggtttaagcgtgttagccacagctcatgctaatgagccagataagggctcacgctaacccgaagtgacagtttgcatataggagggaagaagaaaaaatcctgcttccccccccacgcacaaacttgattgctccttctcaaattcatgtccccaaatcccttcccccattcctcggacttccctcttctcacatgcccccacttcagccacaacacacacactatccgtttttgacccttcctttgcctttcaccgggtcagacggcattgtgacgtcacaaaacccctgggtgcctatatctgacctgcgcggaaagttcattctgagtgcgtcctggcgagtctcagcccccaagcgggtggaacgcaccaagggtctcatccgcgaggaagggctttaacgctcagggtcaggaacctctgagagctcttggggacttgcgcgcccttggatgctcttgcgttcaacagggctaggagactaccggctggggcgaggaatgcaggcgcctagagccttggagctcctgaaacgttcctgccgcctccggaaagcaagggcagtttaccgaagtgactgaggtcagtcgtgtgtccccattgtgtggccacgtgtcctgtgtccatcaccaccttcccaaagtccaagctcagcccgactccttgcggtgcggcctgggaatgctctggcctataaatcagcttcgtggctggagctgtctccaccaccgtggcaaacctggacgctggccccgagggcaaagggaaagtgtactcctaacagattcaggaggaagcagccgcagcctgagcgcggcatctgccagggaaactgtgcgccccaggtcagctagttaactatttcatccctccccaccactcttccctaggccaagtatttgcagcacgggcagggaccagtaactgattttcaggccttttgagaggaagaggaagagagaggaagagaaggatttctaatagtagatattcactctcatggactctttaggaaacagcaacaaagacaagattaagtaagttgatatttttaaaatgctgacaacagtgcacatagtaaacactggatatgtgttaaataagtacaaacagacagaaatagataacaggaggtatatgctaatcatctaagatgttagaaaatactgttcagatctaaaaatgatcaaggctgacatgctcattgattcatcaaataactatgaaacctaatcagaggggaataagacacaatgagtgccttcaatacatttgtgacttagtagacattaaagcagatgtataagaaagtccattaaaacatgcggtgggggcaaccatggagaatcttcttccccatggtcccttctctttggactcccaccttcctgcatctcccaccccaaataaatacacaatctaggtaaaagtggtggacttgttatgcaaacacatcctaatgtcatccagcccctcttccccaaccagatggtcacccctaagcttctcctatataacaattcatgagcagacactaatgatttcaacatacacacaccctttgacacgttactgttaggtgcaatgaaaaggcaagtcacttaaagagacagatcccagaaaatcctgaaactttctacctctgtgacctctggcaagttgctcatcgtctctcaggctctataaaatgagagggttgagtaagatgcctcccctctgattctgactaaatagagaatacaggcgtggaccacatgatcctctagtggcaaccattcctctctttgaatagacgaacttggtttgctgttcttctcccactgccctcctgccataagaaccttcattaggcaaatgatgtcatcagtgagaccagtccttgctggtgccaggattatggctcttggtagccagaaggcaatgtcattgggtcagcatgactttagccctggggactagggcaagagatcggccattggcacctcaggatgcacatgcaaacggatgaaactcaccattgtcgccgacagcattgcttgggaaataggattctcctctactcctgggcagttttgggtctaggaattgggaccccgagaagctgtaatttctgcgagttgtgtgggtcgttcgccacctgccggttatttcgcaaactgcagctgggactgcgaacatttgcaacttgattcattcaggactacttgattctattccattaattcttctccatacaatttggttcaaccatagagcatcgtgaggacttaatgacgttctcccctgatactcccattagagataactgagatgtttgttaatattcagattctgaagctttatcccagacccaccaaatcagaatctggcaaattggctcttttagcaagctacctggaagtccttttgtatactaaagataaagaactatttctctagaggtattctgggtgataagacagtctccattactcagactcatgaagaactaatatattctgataaagaagttaaactagccatgtaaatatgttaatactttatttgggtaagaggatgccctagtgacttgagggggaggagaggctcagtaagttattacaaagatggcctttgatactggccctgaagaatggtcagaaacttgcagcgggaagaaaagatccacaggaacaacctacccagccccggagcctttcgcttccttgactttctccactccagtagccttaacctccattcctcttcagccaccccttgcaagtctgcatcttgggctttgtctttacccaaaagagccccactttggaaatcttaactttccattcccatatgtagcctcatcctctgattcttcctcatcctcacttctgccctacctctctccaacctcctttcctgagctctatttcttccaatctggtctccccccaactcaggaaagtttgattgattaactcataaacctgtaacttataaaatgcgtaccttcccatcctaaaaaaaaggctgatacactctctgaccttgtgaccaccttcagccctctgacaaattttttgaacattagtcaacacccacagtttcatttatttcttgctcttccctctggagtacccagagtgtgtctgtgggaatctttctggatgaggggggctgagtaaagattgtgggtagggctcatccaatctgttgagggactgaggatgagtgagggagaacttactctctctacctgtcttggagctggggcactagtcttctcctaactttggactcagactcatactggaactgtagtctgggtccacagtttgtcaactgcagatcttgggactcagcctccataaccacacgagctaatttcttgaaatacatgtccatctacatctaatttcttactggttcttttttctggagaacccagactaatacagtcaccccgactctattttgctacacataaaagataaatcaggtcctactttatttgatcatctcaatgcatctggccctgctgatcactcatctcttcttgagattctctcctcctttgactaccatggttcttatccttctgatcctttgtttctcagtacttagtttttttagtttctcatccccagtgtcaagttccttgatgacatatgctgcccttagagtttagcttccacctcttctgctgatgactctcaaattcttggttctggactgacctccctgggatctgaaactggtgtgaccaacattgctactggaatattccatggatgtatcaagggcaacatatttgaaactgagatcatgcttattccctcaactcgttccctccttttgtgttctatatttcagggtttagcaccatctgcccacacagtcaaaccaaaatcctggggtcatgccatactctcaccactctctcacaggcactccacaaccaccaagtcttaacaattatacacacacacagacacacacacacatatacacacacaaacacacacatttagtatgtatataatataaacaaatgtacataatgaaaaatccatctgaatttaaatcattttcttcctccctattactatatcattgctttacttcagtattgtcccagctggtattcatgcttttagtttaatctccctcaaatactttttcttcactgccaccagaatgatctaactaaatgtcacagtcacacgtataaaaggcatcagaacataaaaaaatggaactttatattacagccccagacaaagagatctttacaaagtatcacataccctattgctcctctacaaaacctttcagaacaggggaacaggatggctgaatagaagccttcacctatcattctccccacaggaacaccaaattgtgtgactatccacacaaaaaagcatcttcataagaaccaaaaatcaggtaagccatcacagtacgctattttagttttatatcactgaaagggacacctaagaaggtagaaaagacagtcttgaattgctgatgcaactcctcccccatcaccccaacactccagcagcagtggacgcatggcatggacagagaatctgtgtgcttcggtaagggacagcaaagggattgtgggacttggcattgtcctgccctgccatagtggaaagcaacaccaggcagaactcagtcagcacccacagagggagcatttagaccaggcctagccagaggagaactgcccatcctagtgttcaaaagtttagttcttgcaagtctcaccaacatgggctaaacagctcttgggtactaaagaaactcaaaaggcagtctaggccacaaagactgcaattcccaggcaagtcctgacgctatgctgggctcagagccagtggacttgcggggcacatgacctagtgaatccccagcaagggttgccaagggagtgcttgtctcacccctcttccaacctctggcagcacagctcacagctccaggagagactccttccctctgtttgaggaaaggagagggaggaataaagagggctttgtcttgcaacttgaatatcagctcagctacagtagaatagggtgctgggcagagtcctgaggtccctattccaggctctagcttccagacaacatttctagacacatcctgggacagaagagaccccactaccttgaagtgaaggacccagtcatggaaagaacctttgggccctgaatgatcagcaacagtaaccaggtagtatattccatgggccttggcttcaggtgtgacccagcatattcctagctgtggtggctatgaggagagactccttctgcttgagaaacagagggggaagaataaaggggacttagtcttggagcttgggtatgaggttggccgcagtggggtaaaatagcaggcaggctcttgggttcccaattccaggccttggctcttggatggcatttctggactgccctgggccagagggggcccactcctctgaagagagagtcccagaccttgcagcattcacaacaagctgcccgaagagcccctagcccttgagtgaagatcagtgatagcctggcagtactccctgtgggtctggggcagtggtagccagggtgagagacccctctgtttgtggaaaggggagggaagaatgggaagaactctgtcttgtggcttgggtgccagctcagccacagtaaaagagagcaccaggtagtttcctaaggtttccaactccaggctctggcacctggatgttgaagagttaggtgtttaataccctacttgcagtatgggcttccatctctggaccagcctaaggctggggagaatgtgtcaccctggctggctttgccacctactgattgtagagccctagggccttgagtgaacataggcagtagccaggcagtagttgccacaggtcttgggctacatccagtgctgtgctggcttcagatctgacccagtgaagtcctagtggtggtgaccacaggggtgcttgtgtcactgctctgctcccccagctccagacagctcagcacagagtgagagactctattcatctgggaggaagtaaggattaaaaacaagagtctctgcctggtaatccagataattcttctggaccttatccaacaccaccaaggtggtacctctgtaagcttgcaagagccacagtattacttggtttggagtttcccctgttgcaaatgcagccgcagtgatcaaaaacttggattacaatatccaaatttattagaatacctggaaatcctttccaaaaagtactactacaaacaagcccagatggtgagaactatataaaacactaactcttcaatgcccagacaccaatgaactagatggtcaagtatcaagatcatctagaaaaacacgacctcaccaaatgaactaaataagacaccaggaaccaatgctgcagagacagagatatgtgacctttcagacagggaattcagaatacctgctttgaggaaaatcaacataattcaagataacatagagaaggaattcagaattctattggatgaatttatcaaaatttaaaacaattaaaaagaattgagcagaaattctgaagctgaaaagtgcaatagacatactgaagaatgtattacagtcataagataattgacgaagcagaagaaagaattagtgagcttgaagacaggctatttgaaaatacacaaaggagacagaagagtaaaaaagaatgaagcatgcctacaagatctagaaaataaccttaaaagagcagacctaagagttgttgaccttaaagagaaggtagagagagagatgggggtagaaagtttttcaaaggcataataacagaacttgctgaacctaaagaacaatatcaatgttcaagtacaagaagattatagaacattaagcagatttaacccaaataggactacctgaagacatttaataatcaaaaaaggtcaaggataaaggaaggaggctaaaagcagcaagagaaaagaaacaaaaaacgtgcaacggatctccaatacatctgacagtagacgtttcagtggaaaccttataggcatggaggaagtagcatgacatatttaaagtgctgaagggaaaaaactattttttctttccaacttttattttaggttcagggactatacctacaggtttgttacatgggtgaattttatatcacaggggtttggtgtaccgattattttgtcacccatgtagggaacatagtatctgataggtaatttttcaatcctcacccttctcccaccctccaacctcaagaaggactcagtatctattgttctgttttttgtgtctatcttcactcagtgtttatttggttttctattcttgcatgaattcacttaggataatggcctccagctctatccatgttgctgcaaatgacatgatttcattcatttttatgatataatattccatggtgtatatgtcgtacattttccttatccagtctaccattgatgggcatctagtttgattacatgtctttgctattgctaataatgctgcagcaaacttgtccacgtgggtatctttatggtagaatgatttatattcctttgggtatataatataatgctgggtcgaatggtagttctgttttaagtcctttgagagatctccaaacagctttccacagtggctaaactaatttactttcccaccagcagtgtatgaacatatccttttctccacaacctcaccaacatctgctacatttttattttttcatgatcgccattctgattagtgtgagatggtatctcattgtggttttgatttgcatttctctaatgattagtgatgttgagcattttttcatatgcttgttgggtgtgtgtatgtcttctcttgagaagtgtctgttcatgtcctttgctcatttttaatgtggttgtttgtgttttgtttattagtttaagttcctcacagaatctgaatattagacctttgttggatgcgtagtttgcaaatattttctcccattttgtgggtcttcttttttctctattgatactttattttgctgtgctgaagctctttagtttaattaagtcccacttgtcaatttttctttttgttaacaattgcttttggtgttttcttcatgaaatttttgtagcgctgatgtccagaatggtatttcataggttttcttctagggttcttaaagttagttttaggtttttaaagttttaggtcttttaatcatcttgagttgacttttgtatatggtgaaaggaaggagtacagtttcaatcttcagcatatggctagtcctctatcccagcaccatttattgagtaggtattcccttcccaattgcttatgattgtcagctttgttgaaaatcaggtaattatagatgtgcaactttatttctgaattctctaacctgttccattggtctatgtgtctgtttttgtaacagtaccatgctgttttggttactttagccttgtggtatggtttgaagttgggtagtgtgatgcctctgactttgttctttttgcttaggattgttttgaatacctaggttcttttttggtttcatatgaattttagaatggtatcttcttattctgtgaaaaaaaatgtcattggtagtttcatagaaatagcaatgaatctgttgtgggtagtatggccattttaccaatgttaattcttcctacccatgagcatggaatgtttttccatttgcttgtgttgtgtctgatttctttcagcagtgttttgtaattctcattgtagagatctttcacctccctggttagctgtatgcccaggtattttattatttttgtggctattgtgaatgtgattgtgttcttaatttgactcccagcttggatgttattgtgtacagaaatgctactaatttttatacattgatttttttattctgaaacttttatgaagttgtttatcagatctagacgccttagagcagacacaatggggttttcttggtataggatcataacatctatgaagagagatagtttgacttcctctcctatttggatgtcttttatttctttctcttgcctgattactctggctaggacttctagtacgatgttgaataggagtggtgagagtaggcatccttgtcttgttccagttctcaagcttccagtttttgctattcagtataatgttggctgtggattcatcatagatggctcttattattttgaggtgtgttcctttgatgcctagtttgttgagggtttttaacatgaagggatgttgagttttatcaaaagccttttctgcatctattgagaagatcatgtggtttttgtttttagttctgtttttgtgataaatcacatttattgattttcctatgttgaatcaacattgcatcccaggaatatagtctacttgatcactgtggatttgctttgcgatagtttcctgctatttttgtgtggttttctaagtctttttgtagacctctaagaatttatgaatctgggtgttccagtgtggggtgcatatatagttaggatagttaagccttctggttgaattgaactctgtattattatgtgatcctctacttcattattttttatcattgttggtttaaagtctgttttgcctgaagtaacaatatctatccctgctcttttttgttttccatttgcttgatagatctttctcgatctttttacttttagcctatggatgtcattcatgtcagatggttctcttgaagacagcatatagtttggtcttgcttctgtatccagcttgctactctgtgtcttttaattggagggatttagcctacttacatgctagtttaatatggaaatgttcagatttgatcctattattgtgttattagctggttgttacataaattgtgtagttgctttacagtgtcagtggtctatgtacttattgttgtggccagtaatggttttttgtttccatgtttagcactccttaaagatctattgtaaggcaggtttgttggtaatgaattccattagcatttgcttgtctgaaaagagttttatttctcctttacttttgaagtttagttggtctggatataaaattcttggttggaatttattttctttaggaatgctgaatatagatccccaatctcttctggtttgtagggcttctgctgaaaggtcagctgttatcctgatagggtttcctttgcaaatgacctgccctttctctgtagctgtctttaatatatattttttccacactgaccttcgagattctgatgactatgtgtcttggggatggtcatcttttatagtatatcagaggttctctgaattttctgaatatgaacatcgacctctctaacaagattgggaaaatttttgtggacgatattttcaaatatctttcccaagttgcttgctctctcttcctgtctttcagggatgccagtgactcataagttaggtctgtttacataatcccacatttctcagaggttttgcttattttaaaaattttgtttttccttatttttgtcgcactgaactaattcaaagaaccagtctttgagctctgaataatttcctcagctcagttgattctgctgttaatattgtgttatgaaattcttgtagtgagtcattcagctctattagatcagtttggttctttcttaaaatggaaattttgtctttcatctcttgaatcattttactgaattccttagattctttggattgggtttcagctttctcctgaatctctatgatattcattgccatctagattctgaattttatgtctgtcatttcagtcatttcattctccttaagaagcatcactggaaagctaatgtggtcttttggagatgagaagctttggcttttagaattgtcagagttgtcatgctggttctttctcatctgtgtgggatgatgttctttaactgtggtgtcatttgagcagtcaattggcttcatttctagatgttttcagagggccagtctttgtgcagggtctgtctttgtggctgaattcttgctcatggtttcacagtgggatgtattagcaaagtatttttgctattgtagtttcagctgcagttcagtagatggcacttaaacataagggccattagataggttctcactcagttgcatggctcctctgtatttcctcctgcttgcctccatcctctcagtgctctgacagtgtaggctcctctcccagtcaagtgctggccacagatcttggcttggcactcccaggctgcacactgcagccctggggcaagcttgggcttttgtttcctccctagcttaaggtctgcaggggcagagaccttggcagtggcaatggcataaggcctgtcgcttgtacctgggagctccaccccagagaaaagcataagcactgccaattggaatcatcacctacgggtggggtggctgctctgtagtcccaaactgggggccctgcatggttaagaagagcagggagtcagggtctcacagtgaagaaagactgggctcctgtctgtatggaagctgcatgatgaagctctgagcaaaatgaacagggtctttgttcactccccagcccaagagcagcaagggcaggtaccatggcagtggtagtgccagaggggttgtcagttgcttctgggagctctgccctggagaaacacagaggtgctgccaatgggaacgtttagctgaaggtgggacagctgtgttgcaggcctaagccagtgggccctgcctggtgaagaaaaaggtgtgtagagggctctgggggaagacagtctggcctcttttccataggtcttctgtagtgtgctggaaatgtgagtaaagcactcaggctctttgttgttcctttctcagccagaaggtagcagtggcaatggcagagaggctgtcagttgcttgggggaactctacttgagagagacacggggctgtcagtggaaatgttcagctggaggtgggatagttactctgcaggcccaagtgggggtttctgcctgatgaagagcagggtgtcaggagctcacagggaagagagactgggctcctctctgtatggtggctgaggcatgttggatatgtgagcaaagcaatcagggtctttgtgcgttccccaacccaagagcagaaagagttgatatgctgccgtggcaatggcagagagcccgttagttgtttctaggtattccacctcacagaaatgcacagccaccaccaactgaagtgagaaggtggctgtggtgggagcccaggttgggaggccctgctgagtgcagtgtagcaggggcaaggaccagtgtcaagaataatctggctccttttctgtatggcatctactacagcatgttggaggcttgagacagtatttgggctcttcactacctccctagcctgagggaagtagaggtgagggccaagacagcagacagcaagcagcagcaactaagggtctgtcatttacctctgggagttctgtcccagagaaatgcagagctgctactggcccaaatgcttaggtgggagtagggtggctgttctggggtcctgggccagtgggctttgcctgaagatatgaagcagaggtgaggcttgcagtctgtcccttcctcagcactgtggacacaaaccctatcctgggggttagcaagagagcctggcattccttattggtgaaatacacacttacagcaggtggtgtcggggtgctcagggatccaagacccttggggatccatgtgagcctgagtggtagctctgcccggactctaggcagttgtccatgtcagtttggaggcctgggagtggggcgttgtggggagggtcacagggaaaatcctgtgcccagaattgcaaagatctatgggaatagtgtggtcactggggcctcttgctcacgcaccctttccccatggtggggatactcccttgcttccatgccaatccttggtgggcagctgtcctgcctcattcctctctgctctctgtggttcactgttgcttccttgctgaattccaacatggcttcctggacaatcttgtcgaagagcagtactaaggaaaatttatagtgtttactcacaactttatctccattccatgagagcggtgcacagtagctgcttcggtcagccatcttggcacctaccctctggaaaaaaatgtttatcctagagtagtatatccagccaaaaagttcttcaaacatgaaggagaaataaagactttcccagacaaacaaaacctgagggattttatcaacaccaaacttatcctacatgaaatgctaaagggagttttttaatctgaaagaaaatgatgttaatgagcattaagaaataatctgaaggtgaaaaacttactggtaatactaagcacagagaaaaatgtaatataataacattgtaaatatagtgtataaattactcatatcttgagtagaatgacgaaaagatgagtaaataaaaaataataactacaacaacaacttgtcaatacattgaaagtacaataatatataaatagaaataataaaaagttaacaatcagggcaacaaagttaaagtgtagagttttaaaattagttttctctttgcttgtttgtttatgcaatcagcgttaagttgtcatcggattaaattaataggttataagatattatgtggaagcctcattggtaccctcaaataaaaaaccatataacaggtacaaaaaaaagtaaaaagcaagaaattataacataccaccatagaaaactgctttcactaaaagaaagacagaaaggagggaaagaagaaaaagaccacaaaacaaccagaaaaataagcaacagaaatggcaggagtaagtccttacttaataatagcattgaatataaatggactaaactctcagtattagttctttctcacactgcttataaagacaagcttgagactgagtaatttacaaaggaaagagatttaattgactcacagttctgcagggctggggaggccttgggaaacttacaataatgaaggataagcaaacacatccttcttcacatggtggcagcaagaaggagtgccaagcaagagggggaaaagccccttataaaatcatcagatctcctgagaactcactctatcacgagaacagcttgagggtaactgcccccataattaaattacctcccagcaggtccctcccactacatgtggggattatgagaactacaattcaagatgagatttgagtggggactcagccaaaccatatcactctccaatcaaaagacataggctgtctaaatggaaagaaaaaataagtctcaatgatctgttgcctacaagaaacacacttcacctataaagacacacaaagactaaaaataaagaaatagaaaaacatacttcatgccaatggaaaccgaaaaagagaaggagtagctacatttagacaaaatatatttccagatagaaactatttaaagcgacaaagaagatcattatataatgataaagtggtaaattcatcaagacaatataataattgtaaatatatatgcatccaatgatggagtacccagatatacaaagcaaatattattagagctaaagaaagaggtagattcccatacaataatagctagagacatcaacacctcactttcagcattgagcagaacactgagacagaaaattaacaaagaaatatcaatgtaatctgcactatagaccaaatgaatctaatagatatttacagaacatttcattcaatggctgcagaatatacattattctccacagctcatggatcattctcaagaatagaccatattttaggtcacaaaagagtctttaaaaagttcaaaaattgagattatattaagtatcttctctgactataatggaagaaaactagaaatcaataacaggaggaattttggaaactacacaaacacatggaaattaaacaatacgttcctgaatgaccagtgggtcaatgaataaattaaaatagaaattgaaaaatttgctgaaaccagtgataatggaaacacaacaaagcaaaacctttgggttacagtgaaagtagtactaaaagaaaattttatacctataagtatccacatcaaaaaattaaaaaaattcaaataaacaagctatcaatgcatcttaaggaactagaaaaacaagagcaaacaaaacccaaaattaatagaagaaaaaaaaataaagatcagagcagaaagaaataaaacaaagaaaacaatacaacagatcaacataacaaaaagttggttttttgaaaaggtaaacaaaatcagcaaacctttagccagactaagaaaaaaaagggagaagaccgaattaaataaaatctgatatgaaaaaggagacattacaacaaataccacaggaatttagaggatcattagaggctacaatgagcaactgtacaccactaaattggaaaacctagaagaaatggatacattcctagatacataaaacctaccaatattgaaccatgaagaaatccaaaacctgaacagaccaataacaagtaacaagacctaagccataatgaagtcttccagcaaaaaaaggcctggtacccaatggcttcattgctaaatttcaccaaacatttaaagaagagataataccaatactactcaaactattctgacaaatagaagtgaagggagtactttcaaactcattctacaaggccattattaccctgataccaaaaccagataaaaacacatgaataaaggaaactacaggccagtattcctaaagaacattgatgcaaaaatccttgacaaaatactagcaaaagaaattcaatatcacgtttaaaagatcattcatcaagaccacgtgagatttatcccaggatacaaggatggttcaacatttacatatcaatcaaagtgatacatcatatcaacagaatgaaggacaaaaaccatatgatcatttcaactgatgctgaaaaagcattggataaaattcaacatcccttcatgataaaaactctcaaaaaactgggtatagaaggaacatacctcaacacaataaaagccatatatgacagacccacagctagggtcatgctgaatggggaaagactgaaagcctttcttcaaaggtctggaaaataacaaggatgcctactttaaccactgaagttctagttagagcaatcagacaagagaaagaaataaaaggcatccaatttggaaaggagaaagtcaaattatctttatttgtagatgacatgatcttatatttggaaaaacctaaatacttaaccaaataacagaactggctaaacaaattcagtgaagtttcaggatataaaattaacatagaaaatcagtagcatttctatatgccagcagcaaacaatctgaaaaagaaatgaagaacataatcccatttacaatatccacaaataaaataaaatacctaggagttaacctaagaagtgaaaggtctctacaatgaaaactataagacattgatgaaagaaattgaagaggatgcaaaaaccatagaaagatattccatattcatagattggaaaaaataatattgttaaaacgtacatactacccaaagcaacatacagattcaatgcaatccctatcaaaatatcaatgacattcttcacagaaacagaaaaaaaatcctaaaatttaaggtaccatgaaacacccagaatatccaaagctattctgatcaaaaagaacaaaactggaggaattgcattacctggcttcaaattataatacagagctatagtaaccaaaacaggatagtactggcataaacacagacacacagagcaatggaagagaataaagaacacacaaacaaatccatacatctacagtgaactcgtttttaaccaaggtgccaagaacatacacttgggaaaggacagtctcttcaatcaatgatgctgggaaaactggaaactcatatgcagaggaatgaaccaacattcctatgtctcatcatattaaaaaatcaaatcaaaatttaagacctaaaactatgaaaatactgaaagaaaacattggggaaactcttcagaacattgaactgggcaaagatctcttgagtaatatcacaagcacagtcaaccaaagcaaaaaatgaacaaacgggatcacatcaagttaaaaatgcttttgcaccacaaaagaaacaacaaagtgaagagacaacccacagaatgggagaaaatatttgcaaactctacatccgacaaccagttaataactgaaattacaaagaggtcaaacaattgtatgggaaaaattctaataatccaattgaaaaatgggcaaaaaaatctgaataagcattgtgaaaagaaaacatataaatggaaaacaggcatatgaaaacgtgcttgatatcattgatcatcggagaaatgctaatcaaaactgcaatgaaatatcatctcaccccagttaaaatggcttataatccaaaatacaggcaaaggaactcttgtatgctgttggtgagaatgtaaattagtacaaccactatggagaacagtttggaggttcctcaaaaattgaaaatagagctacaatatgatctagtaatcccactgctgggtatataccccaaataaaggaaattagaatgttgaagagaaatctgcatgcccatgtttattgcagcactattcacaataggcaaaatttgcaagcaacctatgcctattaacaaatgaatagatatgcaaaatgtggtacttatacacaatggagtactattcagccataaaaagaataagatcctgttgtttgaaaaaacatggatggaactggaggtcattatgttaaacgaaataagccaggaacagaaagacaaactttccatgttctcacttatttatggaggctaaaaattaaaaagattgaatttttggagacagagagaagaacaatgggtaccagaggctgagaaggatagtgtggtggtgaaagcgtggatggttaatggtacaaaaatatagtgatatagaatgaaaaacgtctagtatttgacagcacaacagagtgactatagtcaatgataatttcttgtacattttaaaatgaaagagcataattggattgtttgtaacacaaagaaagaataaatgcttgaggtacaggataccctattttccatgagtataagcgtgcaatgtgtaatgtgaccattaagcattgcatgcttgtatcaaaatatcttatgtactccataaatatacacctactacatactcacaacaactaaaaattaaaaattaaaataatgaaaaacctttcagtagcctcccattattcttataagaacccactgcctttgaagttcccgtaagagtgaaaaacctgctttgcctcctttcatgaactcagcactcactgtggtgtctcaaaaaaggcagatgttctatatacacctgttgaagaagtgaattgagttggtggtaccaaagctgcttacaaaatgtaagatatatgtatatgtaatacaggaagtggcatgcaaaacacttaatttaatagtctcagaaaaactgtccttctcctcttgtcatctctgtagcctcatttattccttggcatgggctctctaggatcaccagcgatctttttatgtgaatatcttcctagcctcaagcaactgggtcttctctccaaggagcccacagagtttggtgcttatttattgaatagcaggcatttaataaatgttcattgtagttgatattgatggtttcacataatcatggttgttaacttgtcaaagtcttgtgccatttccttctcataagctgtaagtataagaagggcacagtgggaagagcagaggccctgtaatggtgggtcctagggtttgggatggttgggcagggtaggcttggctttgggaagccttgaatgacagacaaatggtttggttgggatggcctgggagatttgtaagcagagaggtaacacagatgataagtctgaaggaatggaagggggattggaggagacagactctgacgacctcaaacccctttcctaacatcactttttctgagcttgttcagcacacacaccgccattcatttattctttcaacagacactagaatgtaagccccaggatggcaggggctgtgtctgcttcatttaccagtggttttttggtgtctagtacaggggctgccacatgataggagctcaataaatattactgcatcaacgtttattggatacctactatgtaccaacaaagtggtgggttctaggatgcaaaaattgaaaaaagactcagtctctgtattgagggagttaacataatattccttttcgcaagagggcaaggaaaaaggctgaatgcaaaaccagaatgtcaacagggtgctaacggagaccaatggaaggggcaactgactctccccagggaaggtaggcaaggagattgagggaagtagcaatgaaaggagagcttgcaaaatgaagtcatcagagctttgcataagaaacaattcatggaccttagatcaagtagtgaggattaaaactatgtctatgtgaggctttggctagtttttctacctaagacatccttacctctcctttccacttgggaatcatcttcctttcctaaccatcatcatcaaccctcaaggcagtcaggggcatctgtggcgcattcccccagcacttggccccacacagccaagctctaacacctacccaccccactgctatttccctctcataagctttaagttgtgggggagcaggttattttgtctgactcacatagttcctgtgtgggggtacctacaaattttggaagcctgtggcttataaaactttggggctctatttaaggaaaggaatacaaaattttaaatataaaatttgatagaaaaatgaatatgtctttagaacaaaaacccaagtaaatgccaccttattgaaggctggcaaaatgccacaaattccaggtaaattatataatatttttattaataaattatctaatcaaccgctatagtaactgtttctgtatttttggtgtacactgattatctcataatttttactttcattatcttcagagagaataaacagataatttattttttctataacatgattgaaatttgtttttttattattgataccatagatacgtaagacatattgcttcacacacaaatatactgaaatgtgtagttgtagaaccactaaagatttgtgccttacaaacaggaattctcatacattgatttcacacaattctccacagaaatggggaagaaaggatgtgtgtttttgctttattatcaagtatattcctgacaaggagagaaattctgttttgatcagggattagagagaactagaccccatataacatgctctccaaacttcttctcaagaccttaagacctagtaactcaggagagtggacagcaggggtgttctggaatctcttcttacacctagacagccagcaaaacaactcttataaaagtcagtgcaaaagatgtcaatataaccactaactatacacaaatgaattttcatcctatcttgttcttatctggatctcaaaggtgtctgtggccactggccatgaggagaagcatgatggagaggatgttaatgtgggaagagatggcagtcatacctaactgtggattaactatcttactttggcaaattaaaaaaaaaaagatgaaaatatgtaaccagacaaactcatttctagagttcctctaagagcctcagagcttatgtagatgtgaggctctaaagctttagttcattagctacatgatgaatctgcctctgctgtctctgagtaggtggtaaacacatactgaatgaatgaatggcagaaataaaataaaaagagcattgaacttggactcagatagcctgtgtgactttgagcaagttacttaactactcagtttattttctcatttttaaaatggggttagcaatctataccttacagataatgtatttgaaaatactctgtaaatcaaaatgtaaaatacaaatagaaaaatagtttttagaaagataacacataatagaagttccctaacttaatatctcaatgagtcccagttccagagatatcttctcaatgattagactgaagagcacaactcaatagatctctttgttccttcaaaagcagagatggagctatctctgagaatggcattctctccatctacttagcagcctaagagtcatctttgacctgtttctcatgctggctcatatctaaactgactcctctttttaaaatttctaaatttttctcaaattcatcctattttcttcatctccaccctcagtaccactttagtccaaggcatcatggccatttctcacctggacaagtgcaatcacctattagctgctttcgataccctccattccactctccaccttgcagccagagtggtcttgtcaaaacgcacatctaatggagccacctctgattacacacttcaagggcactccacctctcaggataaagataaaagttccttgccatggttgacatggtctaccccaaggagctttccactcgcatcttcaaccaagttccccattgtttctgcaatatgacctttgctcatgctattccttctgcctggaaggttctggaaggttccaggttcttcccttcccttttcatctagatatttctactttgctctctgagattgcaaaaacttcctagggaaaagttctcacagcattatgtacatctccttcatgacacttgttaagattacaaatttgaatttattcctgtgatttgactaatgtctgtattagtctattctcatgctgctaataaagacatacccaagaccgggtaattaataaaggaaagaggtttaattgacccaccattctgcagggctgaggaggcctcaggaaactgacaatcatggtggaaggggaagcaaacacatcctttttcacatggtggcaggaaggaaaagtgccgagcaaaagagaaaaaagccttttataaaaccatcagatatcctgaaaactcatttattaccatgagaacagcagcatgggggcatgagaacgccccaatttgggtggtggcacagccaaaccatataaatctccatttgctaaaagaaacataaactcaggaaggcagttataatcatagaacctagaaaagtggctctcttgcagcaaaagctgaacaaatatttttagattgggtgggtggatctcatgtctagtcccccaagtgtctccttagccctagacctcagccacctttttccctggtgagacagacacagaggaattagcaaaagaatttatatccacaatcaggtctgtgtcttatcaggaaactgagcaccccatggcctgatggactgtgtacctcagaatatgtgcctccaaaattttttattagatgagtagtgactgcagtctccaaaactcatgctttcaaatggtcaaacctaccaagtccctgcaagggtcaggggtctctaagtggataggggtgtttagaccacgccccttccactaaacattttgcttcccttgagaaccagagggaaaagataatggggactttctccagccctgacatcaccatacctgatattttgctttctatcccagaagactacaatatctcagacttctcatccacacaatgagaatactaaaaacctatcagtcaacagtaatttattgtacatttaaaaataactaaaagtataattggattgtttgtaacacaaagaaaggataaatgcttgaggtgacagataccccatttaccctgatgtgattatgactcattgtatgattgtatcaaaatatctcatgtaccccacaaatatatacaactactatgtacccacatatattaaacattaaaaaattttaaaataaaagcgtatctcattggactgtagaaagtatcaagtgagataacctttccgatgtgcctggtactgaataactaagtgctgaattaatttttgtttctctctctttccagaaggaatgaaatagaaagaataaagctgaaggacatttcatttatgttcaactagaaatccaatatagttttaggcaaactatattttcccttgcaactgtactcccttacatacatgtaagtgggaaagaataaatgtgacaaacaaaatatcactcctgattccacaatctaaacaaaacactgcctctttctaggttttgttttttggtttttgtttgtttgttttttggcatagggttggggtgtatgcttcttgacgtacctacataatgaggaatacaaggctttgtatcttttatcagtaattattcatagcttaattgtgtaaattgtaaaatatcacacttttataatcttaatttttttttgtggctgcagctattatttgaataaactgtaattaattattttccctgagctgaagatttcatttctccccacactatctggaatcatgttgccctgaacatacttgtgcatatttttctacatttctgattatactagtaagcattgaacacataatgtgcatcaggcaccatgcttagtcctgaggatttagaaatactgatatttgatctctgtcctgagagttcttagtccaggagaggagacagaagagtggaaacaaaatcacaagagagtgtgtgagtttgcagagaaaactgccaggcagtatctgggccaaggaaggatgcccacctctgactaggagcaatgagtcagaaaaaaaaaaaaaaaaaaacttttttgaagatgtagtgtatgaattgacctggtgagtgttgatccttactcctaagccttccattttggcagcctcccctagctttcaccttgaatttttcttcagaccaagcataccctgataactttggatttgatgtccctttctctgttatcaatggctgagccttctctgcccctaagtgtcttctattcctaatgacattgttgctctgtcctctgagccatcagacttcaatccagtcctatttgtgactttgctaccatagtaatagtcagtggggttgcggtaaatgtttagcaacccacccacccaaacaaacagtgcttgctaattatcatggtgtaaagactcactctatgactgacttcaagctaccaacatcatgtcactgaacacagaattgggaagagaggtacagtagcatattatgtcatatttctaccacatagatacaatggacataaaataacattaaaagcataggtagtaataaaatgcagtaaagtaattagaagtaatcttcttggagtatttattacctttgtttttaatataattgattcaatcacaaatttacataattttgtttttaattgtggttctgtttagaaatatgctcacaaaattattgataagttcttgaaaaatagtctctggaatgtctatgtgaactatcaggttggtgcaaaagtaattgtggtttttgcatttttttaatggcaaaaactgcaattacttttgcaccagtctaatacttttagctcacaactggctatgaaccagttacatgaatttgtcgtgcctacttctccagactcagcttacacctctctccttttcactctctttacccgcccccccaacaactggcttatgtatgctcctcagaaaagtcccatttactcatatattagagattttgtatagatgtttcctctaccagaaatcccttcccctagctctttgcatttggagcctttccataattcagttctcagctcaaacattaccttgttgaatagatcttccct

SEQ ID NO: 650 - DNA, 26 bp, synthetic construct
  source 1..26: mol_type = other DNA
gccaaggtattgtggcagcaaagttc

SEQ ID NO: 651 - DNA, 26 bp, synthetic construct
  source 1..26: mol_type = other DNA
ggccaaggtattgtggcagcaaagtt

SEQ ID NO: 652 - DNA, 26 bp, synthetic construct
  source 1..26: mol_type = other DNA
gggccaaggtattgtggcagcaaagt

SEQ ID NO: 653 - DNA, 26 bp, synthetic construct
  source 1..26: mol_type = other DNA
agggccaaggtattgtggcagcaaag

SEQ ID NO: 654 - DNA, 26 bp, synthetic construct
  source 1..26: mol_type = other DNA
aagggccaaggtattgtggcagcaaa

SEQ ID NO: 655 - DNA, 44 bp, synthetic construct
  source 1..44: mol_type = other DNA
ggaactttgctgccacaataccttggcccttctcagttcgctac

SEQ ID NO: 656 - DNA, 43 bp, synthetic construct
  source 1..43: mol_type = other DNA
gaactttgctgccacaataccttggcccttctcagttcgctac

SEQ ID NO: 657 - protein, 14 aa, synthetic construct
NFAATIPWPFSVRY

SEQ ID NO: 658 - DNA, 23 bp, synthetic construct
  source 1..23: mol_type = other DNA
gagaagggccaaggtattgtggc

SEQ ID NO: 659 - DNA, 23 bp, synthetic construct
  source 1..23: mol_type = other DNA
tgagaagggccaaggtattgtgg

SEQ ID NO: 660 - DNA, 23 bp, synthetic construct
  source 1..23: mol_type = other DNA
aagggccaaggtattgtggcagc

SEQ ID NO: 661 - DNA, 24 bp, synthetic construct
  source 1..24: mol_type = other DNA
ccaaggtattgtggcagcaaagtt
